United States Patent Application Publication US 2007/0020625 A1 - sequence listing, part 6

SEQ ID NO: 5834 - DNA, 5648894 bp, Photorhabdus luminescens (residues 1,882,966-3,765,930 of 5,648,894)
  misc_feature (1135941)..(1135941): n is a, c, g, or t
  misc_feature (3459194)..(3459194): n is a, c, g, or t
  misc_feature (3474971)..(3474971): n is a, c, g, or t
  misc_feature (3540963)..(3540963): n is a, c, g, or t
  misc_feature (3600417)..(3600417): n is a, c, g, or t
  misc_feature (4864869)..(4864869): n is a, c, g, or t
  misc_feature (5648878)..(5648878): n is a, c, g, or t
ttctcaacgagccggataatcaactgtccgtgctcaacactgacctgcactggctgcccggtcacaaagcccgcttcttccagccaattacctttaagatgcaagctgggatgctggctgtaatagcgggtcatgccagtgtggcggtcggcgtgacatcggctgatatagccgaccttatagcggcgttgcgctttcgaactgcctgaatttacattacaatcgcgttcagccatagctaactacctctgatagtgggttgtggttagcggtgctgggatgttctcagcatctcaacaccgcgtaagtattgtctcttcttgagcggctaacgttttaccgtccaacgtttagcatcatgcatatgcaacatactgctaatcactgtctcaatcgcttcccgctctttctcatccaactgtgagactgcttcgaactggagttttagccggtcatcgggtccgcgctcattgggatcaaaaagaagcatatcggcactgacattcaacgctaatgcaatccgccgaaacacatcaatcgtcggctgggatgtcccggcttcatagcgcttgtattgtgaaacgtgcataccaatcttgtcagccatctgttgttgcgtgaaaccaagctctttacgggaagccgccaatttatcagaaaagctcataggaaattccaaagttgctgtaactgacgtcactatacccctcccgtttttatcgcttgactaaaagtatcatatcagggactatatatattatcaatatgaatcttgacgcattttacaggagtagaggcaatgacccgcgttcccgataccgatttagcccgcttaaagcaaaccgtctcgttactggggctggcgcgtaagcaaggccgtccgatgaaaaaacgcggtgaggattatgtgctgcgctgtccgttccataacgagaaaacgccctcaatggtgatatcgcctgctaagaacctgtatcactgctttggctgtggcgcagcggggtcggtgctggactgggtgatacaaacggaaggggtgacgctgaaaatcgctatccgccggctgcgggagctggccgggttgccggatatggacaatgcagttgtggccgcttcttctttagccgccccgccggagtcctgtctttcctacacaaatattttaacccgcccccgcgttattgaacttttccctcatagattgatctcaataaaaaacacgacttgaggtaatctttatgttttcaaccagcgccgaacaatgggcaaatgacacgtttcaacatgcggaattaggtgataaacgccgtaccaaccgcctggtgaaagtggcctgttcgttggctaaccatataggacaatcgctcgtgcaatctcttgactctcctgccgatgttgaagcggcctaccgactgacccgaaattccgccattgcgcctcaggccatcgccgaagccggatttaccgccaccgtcgctcacgctcaacgttatcattgcctgttagcgctggaagacacgacaaccctgtcattttcccatgcgtcggtcgccgatgaactcggctataccacctcaaaggaaaaatcccggggcatgcaggcacactcggtgttgttatttgcgcctgaagaacaacaggtcgtggggttgatagagcaacagcgctggtgtcgagatgtcagtgattatggcaaaagccgacaacgcgatacacgcccttatgaagggaaagagagttataagtgggaacgggcctcacaagccgtcgacagccggttaggggagcagatggccaacgtgatttctgtctgtgaccgtgaagccgatatcatcgaatatctgcgttataaaacgagccaaaaacaacgtttcgtcatccgttcgatgcaaaaccggcgtatagaggaaagtcaggataaactttatgactttattagccggttacagagtgctggagaacgattagttcaggtcagacagaaaggcgggcgtcaggcgcgtgtcgcgcattgtgatatcagttatgccgaagtgacgttgaaaatccccgaaggaaaaagcggtgaggcggtgcggatattttatgtcggttgctacgaaaaaggtccggaggatgggctttgctggcatcttctgacctccgaacccgtcaacagtcaggaagacgcccataaaatattcagttattacgagcgccgctggctgatagaagaatttcacaaagcgtggaaaacgggcggcacgcaggtagaagcgctgcgtatgcaaagcaaagataatctggagcgcatgatagtgctgctggcctttattgcggtacgaatacaccagctgcgttttatgggtctgaacaaagaagaggcagagaaagagagctgtgagacagtattaagccccctggcgtggaaattactgtggtcaaaacaagaaaaacgccgtgtgccgaaaaaagccccgagtttgcattgggccttcatcaatctgggaaaactggccggctggtacgattccaaacgcacgggtcgagtcggatgggaacgactttgggaaggctggtttcggctgcaaaccctgatagacggctatttgctggctaaatcagttgatttggagatctgatcaagagacaggccggagtcacaggcggcccccctgccgcgcccgaaactggccgatctggacgatgacgggcaggcgctgttgcatcaggtgattgatttttatcatcagaacttactggcgtcaccggaagccaaagcctggctggaaaaacgcgggctgcatcatcctgaactggtcagccacttccggctcggttatgcgggtcatcacggtatcagcggttccgcgggattgttgccgtccaaagacagtcaggaaggtcagcagttgcgcggcaagctgtcggggctgggcgtgttgcgtaccaccacccggcaggaccacttccggggctgcgtcgtggtgccgataatcggctgggccgaatcgaccagtgtggccagccgcgggcgggtgctgcaactgtatggtcgccgaacccagccggattacaaagtcctgaaagacagcccgaagcatctgtacctgtcctcaccgctagccggggtctggaatgaggcagcgatgaaagccgctgcggaaattatcctgtgcgaagcgctgatcgatgctatgaccttctggtgtgccgggttccgcaacgtgatcgccgcgttcggggtgaacgggtttaaccgtgagcatctcgaagccttgcagtatcacggcgtgaagcgggtgctgattgcctttgaccgggacgaggccggagaccgtggcgcggctaatgtagccgctgatttactggaagccggtatcgaggcgtggcgggtgcagttcccgccaggtatggatgccaatgactatgcgctgaaaagcggcaatgccgaacatgcgctggggctggccttgcaacaggcggtctggctgggacagggaacagcgccgggcgcggtgttcagccatgagcggcccgtctcgccgagtgtgacggaaaagccccaaagtgccggggtggctaaatcttcttctttagccgccccgccggcgctgaccgttgcccccgtgccctgtgagcgcacggcgtccggtgagttgttgatgaaaagcggcccccgggtctggcggatacgggggatgaaaaaatccccggtaccggacgtgatgaaagtcaatgtgcaggtgcgggatgaaacgtccggcctgttccatgtggatacgctggacatgtatcacgcgcggcatcgtcagaactacatcagcacggcggcgcaagagctggaatgcgagctgtcggtcatcaaacgcgaagccgggcgggtcttgctgatgctggagcagcaacaggacgcgcaacagcaagccgacgccgaagcctcagggacaacggcggtcacggtcagcgcggaagacgaagccgccgcgctggcgttgctgacatcgccgaacctgacagaacagattatcaacgacatggccgcctgtggcgtggtcggcgaatccaccaatctgctgaccgggtatctggcggcagtctcgcgcaaactcgataaaccgctggccgtgctgatacaaagcagttccgctgccgggaaatcgtcattgatggaggcggtgctgaacctgatgccggaagaggagcgtatccagtactcggcaatgaccgggcagagcctctactatctgggggaaaccagcctgcaacacaagatactggcgatagccgaagaagaaggcgtgcggcaggcggcttatgccctgaaactgttgcagtccgacggcgagctgaaaatcgccagcaccggcaagaacgaacagagcggcgaactggtgacgcgggaatacaaggtacagggcccggtgatgctgatgctgaccaccaccgccattgatgtggatgaagagctgctgaaccgctgtctggtgctgacggtcaacgaatcgcgcgagcagacgcaggccatccacgccatgcagcggcaccgccagacgctggccgggttgctggctgactcggaaaaaggctatctgacgcagttacaccagaacgcccagagcctgttaaggccgctgaaagtggtcaatccttacgcccatcaactgacgttcctgtcagacaaaacccggatgcggcgcgaccacatgaaatacctgacgctgatacaggccattgccctgctgcaccagtatcaacgtgaagtgaagaaaacgacccaccgcgggcaggtcatcgaatatatcgaagtcacccaggacgacattgccctcgccaaccggctggcgcatgaggtgctggggcgcacgctggatgaaatgccgccgcagacgcgcaagctgttgctgctgatacaggactgggtacgggaaaccgccggacaacaggcggtcaaggtcgatgaactgcattttacccggcgggatattcggaccgctttgcactggggtgatacgcaactgaaagtacatctggcgcggttgctggaaatggaatacctgttgctgcatcgccgcgggctgacctatgaatatacgctgttgtgggatggtgaagataccgggcaaccgcatctgtgcgggttactggagatgactgaatcccggtcagaaacggcaggcaatgtgtttcagtcggggtcagaggatgttcagtcgggcacgggtcggggcagggtcggcagtcagtcggtaaatcagaatccggcctcaaggcaggcaacatcagacctgtcggcggaagtggccggggtaaagcaaaaagcagttattaagacagaaaaaaaaccggcttcaatccccctgcccgaagaaacagaaatgacgaatgacgctgttgcgggcaaggcgttccggtcggggtcagagggtgttcagtcgggtacaggtcggccccaggtcggtacacagccggacagacaaaatccggcctcagcacagacagcacaaggtttaacaacagaaccgggcggggccggaaagaaaacggttaacagacataaaacgcaaaaggccccaccgcccgctgcctcagccgcccatccccaatccgaaacggaggttaatcatggcaaaccgtaaaccccgcaaggggagtcttctgaccgttaatgacgtctaccgtcagcctgtggggccggcgcatgacccgaaaagcctgtatgcactgctgctgcgcttcgtggcctggcggcaggaacggaactggtcggaaaccacgctgaaagtgcagacccatcacacctatcactttatcctgtgggccacggaccggggcctgtactatgccgcggacatcacgcggccgatactggagcgttaccagcgctacctgtaccagtaccgaaagaccaacggagagccgctgagcatccgcacccagcgcacgcagttgcagccgttacaggtgtggttcaaatggctgacgaaacagaacctgatactggcgaacccggcagcggacattgagttgccgcgggaagaaaaacgcctgccgcggtatatcctgagcattgatgaaatcgagcatatcctgtcgctgcctgacccgaatacgttgcagggcgcgcgcgaccgggccctgatggagctgctctggtcaacggggatacgacgcagtgaagcggcccggctcgatatctacagcattgacgggtcacgcaaaacggtgaccatccggcagggcaaggggaataaagaccgggtattgcccctcggcgaacgggccttaaactggctccagttctatcagcaacaggttcgcccgcaactgctggtcaccccggacatccaatcgctgttcgtggcaatggacggtctcgacgggttgcagccgaacggtatcacgaatgccgtaagcggttatatccgggccgccggcattgagaaaaaaggtgcctgccacctgttccggcatgcgatggcaacgcagatgctggagaacggcgcggacctgcgctggatacaggccatgttaggccatgccagcgtggagtcaacccaggtgtatacgcaggtctctatccgggccttgcaggcggtgcacgccagcacccatccggcggagcaaatggccgacgaaaaagtccgcgacgccgatgaggtgggtttactggccgacctgtacgccgacgataacgccgacacggacacgccgccggacagttcagagccgacctcaaccgccgatagccgctgagcgtccgcacgcccccgttgagttgggcgggttcggtgtgggggcagaccgtggccggactgcccgtcggcatcggcgcacgcgggggtaaatagtcgtcaggcggctcaaccacgagcgtccccgttaagccggtccaggccgcccaacgcctattgaacataatgcgggggaattatacgcactgcgccggtgagcccgggcaaccgcctgagcattgatgagcggcttaatgcgtataattggcattatgtcttgcgcccccgcgggtcagcattggcaggtgtggcgcacaaggctgacgccttctgctatcagcggctgagccagtcctcggcaaaaacccgtgttcttctttagctgccgtgccaacgtccggccaacaaccctgaaggcagatcggcctgcggcctccgctcattgacttccccccgccccaaccccgctgcactggctgcgcccggttcgcagtcgcaggctccttgctcattcccgtgctcgccatcgccgccccgtgcagcccccgggggcttccctgaacaaaacaaaaccgcgtggtcatgcaaggtcatacgcaaaccgaagccacagtgcctcagagcgtcgcaggggcgccgcttgcgggctctgtgccgcccgcgcccgcagaacgggcacccgccgcccaagcgagttgggcgacgttcgcccgttgccgaagaaggcgctacactgaccagagtgcggcgggaaaaaccggccttcgggggcgaaaagcgcgtcagggggttttgggtccggcggtgaacgcccattggaaaaaacgggtggtaactggctgagggcattgggaaaatcggtgtttggcggtcaacgtcgcaatggaatgggttgttgtagacaacaaccacctaagtgtggagaagaaccaatcgcgcagtgaggaactggttaattgtcagggtgatagcagttgccgttctgccattagggataaatatcggcaggagtatgacaaggttcaggagcggatagcaacgtgttccggggctgaccagtgcgttgcggttgccaaagagctgcgggcattgcaaggtgattacagcgcccggatgagtgaaattcaggaaaaagccagaatgcagggtctggattccctcacaccggcagaagtgcgggaatgggcagatttacgcggtgccatgtcaaatattgatgcgtcccgcaatttagtactccggcggctcagaagaaactacccaggaaatcgtgaagattatggggcagacgggaattgcggcgtctgcggggattgctggagggatcagtaaggctggagcaaaaggagtcaagggaagtgctgtaccagtacctaatccagtgacagcgaataatgggttagtttataaatcaaatcctaaacatactcttggtggtgatggaaatcgccgtaatgcgggaatagaaccaaaagactcattgaaactttttgaaaattcaattccaagctccaaaaattatggtaataaagaagttagatttgctaaggatgaaaaaggtaatgttcatcggttcgaagggaccaatggggaatatcactggaatggcagctctggagatataaaaaaccagttaacaagtaaacaggttccaagcgacattcaaaagaaattgggagttaggttgaaatgatttatggcgatccgttttatttttctcttcagttcgatgctgttgaatcatggaactcatctgatggcttttggaaaaatggcatcttctttttctatttggatggacataaaatatttgatcttttggatgtttttgagctgaaaacaaccttcagtttttattcaaatatgaaaatagatgaattggtatgtaatgatgtcaacattggaccagttagcctgtatagaaatgctgagagctatttcacaggggatggagaaaatctcattgaggggctgttcgatatgacatgtacaccaatgggagataatggatattatgtttacttcatgaaaacgagccataatgatcgttttgtatggagtaatgatgatggaaaaacaataaatgaaacattattaccatctggtactgtaagttctgtaattaaaaaattatctaattattgatgttagaaacataaatcccggccaaaatgaactaccccaaatgttaaacaatcatccgacatttaaaaggggtagttcattacgtctgggaaaagtggcttatcaggctgaaaagtcgcgtcggggcgttgtgggctggacatcgaaccataccgggaaaagttgcttttaactaactgaatgcactgagaaaatttaaggtcggcggtcaacgtcgcaatggaatgcgttgttactgacaataatgcactgagcttgccaaaagggatggcggattacggtcggtcagcatcaagtctgggtaccgctatgctaaatgaaggtaaatcccctcaagagatttcagcggcgttgtcaaaacatgccaaaggtgatcacccggaaggacaagatccggtaagaggattgttagtcgcttggggagcgggaatgtccacagtagtggcaccggtgctgctgccatcgggagcaacggtaggcagtatttttgctggaggtctaatcagtggaacagctaatgtcagtaatcaattgacaaatggtcctgtgaacattactgatgcactgatagccacaggaacaggggcattaacgcaaggcaaagggttttggtttacagaagtcgcgagtataacgggtgcttatgttggggcaaaactacaggataaaaatccacttgccccggtagtaggtgcagcagttggtaatgttgtaggtactgctggaggaaaagtaatcgacgttggaaataaatatttccctatagtatcgaataaaacgtcaagtactatcggagctattggtggtgctatagccagtgaagttacaggcagtaaagttgaggataagctggataaatcaggaggagcgaaatgataactcattttaagtcattactgattcttctgttattatgcacaattattatgattatggtggtcttattaggatgcctatgtgctgcgattttagtttatttgaaaaacgaaacattcatctttagttggcatgatgatgttgttttttcagtaaaaaaaggggtagtaacaggtataccgactggaataggaatttggatcttatcccgtttgaaaggaagtcgtgagaattaagacgccaccatctgattgatgaccggaccaactttggctgaggaaataccctaatcataccggtaatacggaaggtaagccggatactggcgggaagaccacaactactccgattctgggagagccaaataaagacgacttagcctatctggctctgaaaggaaaagaagcccaagaagcagcagggaaattaggctttgatcggagaatagctcctcctaaagcaccatttaactcacatgggcaacctgtattttttgatggtaaaacctatattactcccgatgttgatagtcataatgttactaatggttggaaaatgtttgaccgtagaggcaagcgaatggggacttacgatagtgatctgaacagagttaaggactgattgatgtttggtatatttcccggtgatgcacccatcagagaaaacgatgagctagttctgcctgcaacaattattattgatacatttacagaagcagttcacatacctttatcttattggagctttgaggattacaagcggagttggcgagtttctcttgaggagggtatacacagtaaaaagcctgtggcgctagctgtatcaatgtatgagcctgattacacaaattttatatttgtttgggtcatatatttcgcaggtgaggaagttttcttgcaaaatagcatcctctttttggatgagtgtccaggttttactccagagaagataaataactttatagagtcgcgtactacgcacaatgaagacggaatgaaaatatctgaatggaatactgatctaaatagcattatagatttttataacagtcttacaattagtacagaatcccagtcttgagttaggatttttactttattatccactaaattatagtggacaataatcacttaagcgttgaccagaatcgctcaaggagtgaggaactggtcaactgtcagggggataccagttgtcgttctgttgtcagggataagtatcgccaagaggtaaccctttttactcagaacattggtatcttggtgaagtagacaatagatgctaatacctcatcgatgagaaagttatcttgaaaaatgccgttaaagagcgagcttcttcgcggtaatacgcagtttaaggataagtgagcatgattgtatatattccgtttattttgatggtcttgagtctgttgggatttcttgcctgcttcatctattttggcttgaacaaaaaagtttcactaagaagtgtaaaatctccgttgctcttttttgatttttgtttttttaataaaaacaaacttgctaatttttccatgataatattatttgttatttatatgtctggaattttgtttgaatttattaaaaattaatttcctttgctggttattttattggagtatttgcaattcttgtttttcttattcattgcagatttttctcaaaaagaaaatttgcacatagaaataatattgaattcataaaagagtttgtttttgaaatggaaataagccttcaaaatacgtcattatggttatctaggttattttatattgtttggctttatttgtttttttctacgtaattgttgtagacagtaatgcatttaatatgggaagtctgtttggttataaagaaggaggaactcagtttgatcttatggggcaaaggaccgatacatttactaatgaacgggctattcaaaaaaataggagaacaaaatggttatcttagttaacaataacaagattaatatcaatgggcacttaattatacttaatcgaaaaatcattaaagcgatagaaattgataatggttttgttcttgtcttaattgatattcctataggagatgatggactaaataatttattttcttatacaaagaacggagagtttctttggcaaatagagccttcgaatttacaaaaagaagggcaaacaagttacccatacgaagggttgaatgttgttgaagggcaatactttgttgttgatttttatggaagaagaatatttttcgatccttatactggtctattcttatcacgagatattgtaaaataagatatggataataacgcattagcgatcagtttgattcatacatgagctaatataggtatttaacatacttctaatggtagtattaatttcaattatgttgtttttgtgcattgggctggctcaagctatgtaaaatatgatggttaaaagagtgattgggtaaagtttttctttattatcagatggttgtgtcgtttttttatagatggaatatttcttttttcacttggagatgtaaataaggttattaaaaaaggggtatttatcgggctaataagttatttttttatatactatcacctgtatgatttacgtaaattaataatcaatctttggattgaagttactattttgagaagttttatgaaatgtattaaatgtgaaaacccaacattacatgaatcagatttttgtgccgcatgtgaagaaaaagaactgagtagaattggcggatttctctatttcccggcaataaacattatctttgcaatattaagttctttatttagtgcatataaagcaatgacaatcctgatctctggttatgattttctaggtgaattacgtgtccttataggatttgagtttatacccgtcatctttcaagctgcctctttgttggctgcactcactcaccccggtcacatagttatctatgcgcccggggattcgttcccttgccgtcgcgatgcaacttgaaatccatagggtatatttgttttacccttatttttggagttgcactttatacatctgttcttttctttagaaaaaagaaaaaacacctttattttatattatccttttggtttttacttcattatttgtaataaccgatttaacattgtctcattatgtatatgagataaaactggattatagttatctcttcttgctttttaaaactgtgttttatgtatgtatatgggttccttattttattatatctatccgagttaaaagaacatttataaagtaatgattaaaatcaaactattttgcaaataatattcaataagagtaggtaagttttttgcaacccatatttattcaaaaaatatgacagtcaaaattaccccggccttgtgaattatttaaaaaagtcaggcaatttaaatcattcgttcattaaggtctgagtcctgtattttactgggctaagactatttaacccgaattctgcttaagccgtcattaaaatatctttctctgagtagaaaattttcagtgatggctttttcaatttaaggctgtaagcaatcaatccacctaaaacacacaacagaaagccttttatacttcggtggcgcgagtgctcaatttgagaaatggtctttaattgcccgttaatcgtttcgatgataaatctcttttttaacattaagttattccactcagacagcgcttgtgctttcatattacggcgtttcttcgtgatgaaagtcacaccgattttggctaaatcatcggccagttcctgactgagataacctttatcaccgtaaagataacccgttaacgattttgataattcgcgtacaggctctcgatcattcacattaccgggagtcacttttagcgcgagaatttcgccctgatggttaacaaccaagtgtaatttgaagccgtaaaaccagcccattgatgtttttccgcgctgggctattcccttaaaaaccttatgacgcgggatacggatgttatgacagacgcacaaactcgtggaatcaataaaagcaatcttggtcggttttccttttaattgagtcagataactacatagtgggaccaaaacggaaggggcaacactgacaaaacgggtataactgagcagggtggggaaatctttgtggtgatatttccaaatatgttccagataaaaatgtttaaaatcacggtaatgcgccatatgaaaaaggatcaaaatagtcatgatttcactggggtgcatatggccttgccgatgacgctggcggtaccctttttcgaaacaaaataattcccattgaggaatgaagaagcggcaaaaatcatcgacatcgcagaaaatttcaactaacttgttcatagcctgttcctccccggagctgtttcggcgtgcaccaaaacattgctcctggaacaggcttcatgtcaatttcttatccagaattcgggttatttaatctctacttgattcttaagcgtggacgaatgggagattacgatggcccacctatccagtgagccatttttaccattattgcttatccttatggcaagttaaatcaggcaaatttccccttgccaattgtggtatctgcccaagccgtggtaatagccattttctccctgttatccagcgcttcaataaaaccgttatcaccggctgttggggcaaaactgctcattgcctggattaaggtatcaaccgcattgtcggaaagtgccgtaaattcacgctctcctgatgcatccttacgccccatctgtgtcactaatttggcacggttaccattaaagtaatctctaaaggtgactgaacccaccgattcaaatagaccctgagccgttttatcctgagtagggcgattcactgataacaccagatcatatccactgcgctggaaccacaagtcttgccagtcaatatcgttaaaggcaatcatatcttctgcattaatatcatcaacctgactgtcaatcaccttaccactgaccacaaagctatctactcctgcccctccttggaagtggttctggtatccccccaacaccagtagatcctgaccctctccgccgtcaaactggctgaatttcgaaattgtagccgctatcaggtgatcatcaccttctccgccattaattaccgcatgatagcccatcaatttaatgacatcgttacccatgttgccatcaattcggttgtcattaccaaacacccggccaaagtcattgccttcacctagctcaacccggttgttattaccgatagtcacggcataatcttgatcttcgccagtatccacctggttgtagttaccagaagtgacaacgtagtcccgcccattaccggcatcaataacgccaccttcaccaaaaacaaatgtctgatcgttaccctcacccatgaatacatggttaatgcgtccagctaccactgcggtatcatcgccactaccgccaaacatccagttttcacgtcccatcagaacgcccaagtcatcaccttcaccaccggtaaagatgttggaagtgccgatggagtaataaacatcatctccgcggccaccccagaagttgttgttatcgcccagataagcaccgagatctttaccatcaccgccccagttgaagttatagtttcctaacgagatatggatatcgctgtccccttgcagatgaccactgttacgcaggaaatcaaacgttttctgctccatattgagcagatcggcggtgagattctctttcagattggtcacgagtgacttcatctcttgttgtttatctttgctgaatatcgtcgcaaacaggttaggcaaattcagcgaattaaagcccaatgcccgctctgatttgtcatcagcctgactcttcccactgttgacggcatccggtacactcttttcccgattttcatcaggcgctttctctttcagcccatgactgacaaaaaatgactcaataccatcggcactcatattagcgttctgtttcaaaccctcaatcaatttatccggatcagtgaagacacttagttgatcaccaccaaactgcttaatcacttccaacatctctcgcaaaatagccttaccatcaaccggctcaccagtacgggcaacaatctgtccctccggcgtataatccacaccaaaaatatccgctaacgtggtctctgcattcacaccggctaaccgacccagcagtttgtttttaagctgacgcggtaagtcctgtaggttgtaagtaaaggttgttttcgccaagcccgttgttgaatattgctgcgtcatcagaccaaacaacgaacccagattggtatccaaaatcgattgaatatggtcaccgaacataaagttccagctaccggttgtgacctgaatgtccgccccttgaccacctaccgcaaaattgaaagccagtttctcattggcttgacggaatttatccacacgactcatcttcttggtatcaatattgttgccgtgaccatttaaccattggtggtattttttgtttaatgccgcttctgtgtcgcttttcaaaccccggctactgcgcttgagctgcgaatccagatcaaccaatgtcttgtaatccacactactggtttggtctaaacccgacatgtcacgcacaaattttttcgcgcccgatagcgtccactgctgattttgcgccgccaaccagttccgctcttcgccggaatgagcaatagatttcagtacaccggtaatacgcgcagcgccatcaaatggattaactaacggtggcgtagggatggatttatccatcatgacaatcaggtcattactgcgaccttggttgaagctgacgttacggttgccaatgaacatctgcgccccttcaagtgcttgataacctgccagattaacgctgtgcttactgtcaccctccccgatgtgaaccatcacattgttgtcgccaaaggccagtgatttaaagccacccgtacccactttaataccgacgttcgaggttccccagttaatcgcagtaaattcaccgtcgcccacgtttacctgtatattcccggcgtaacctagcggctccgactgaggatttgaaccaagctcaaccctgtttttgcgctttcctggcgcagtgaaaacatcatggttatccgcaattgcccctctggttgctgaatcagcttctgtgtgccccactttggcaaggttgatatcactttcagccacccctcgacgcaatttttctgtcgtcgtcgtgagttcatcctgttcattccagcgtaacaccagtttgttatcgtccaacttgttaacccactgatgatttttatcgcgagtaaacttacgacctgttgcatcaacggccacttcactgcgacgagctgaaacctcactacggataccttgtttatctaaagcggtaataaaacgataggcaaaaccattccgcttatcatcactaatcagtgaacaacccacgatgctgatacgatcaggtttacctgcctgctcaaagttctggctgaactgttttagttttattgccaattcatcagcactgtaaccactcaggcgagtgttattttgtgccgattcgttacggccatgccccacaatctgccaacgtaatttgcctgataaaccggcaggatcaccataaatgacatgatatttgccattagaatcaagtttaaccaccacactggatttccggtgtttactcgccagattgagcgcggcttttgcgacaatcgggtcattttccatttgaataatgatctgaccatcaaaacgtgttccacgattgtcactcttttgccacgagttcttcactccatcccgatttttattttgaaaatcggagagcgtcgagacaatcctatcagtatattggctcattaaagcaccgctctcgacatgaccataaaaggtttgttcacccgatacgcgataaccagaagcggccaatcttgcacgcagcttttccccttcatgccccaaaccttgattgtcagttaacagcatgatcggcgtattgatcggcagacctttgaggtttttttctactgaaaattgtccgttcatcgcttttgccaatgccccaatcatgccaccagggtttggtacgtcatgcgcggttatggttttggtcatactcgatattggcctgtcgagtaacagacctgacacggcttgattattttgcgacgcatatcgagcaagatctgccgccaccggtccaccaacggaataaccatgaagaataatattacccggcttaatgccgcgatcttgcaccaaatagcgaaacatcgtccgggcatcctgatagaacccttgttcaccgggactaccatcactacccccatagccgcgcatgttgacagcaagtatatcaatgccctgcttttgataatggctttggatatcatgagcttgctcttccgcggataaacctgaaccatgaaggaaaagcacgacttttttctctgccgccgtcgagatatcatctggttttatgtcaccttgatgataatatccggttaaacgtccctcttcgccttttagggtgattttgctggatttaccattagcaaccgcatcattaagtatcgtctgcgttttatcactgatatgacggcgatcttctttaaaaccatacagttcgttgttaaaaaatcgggtcactgggtttaaagagtctttatcccgtggcggagtatcatcattttcaattaataccgactctgacgcgccatttttgcccgataacgcctgtaatgcttctaccggagagtcgttctgttctctctcaggggtattttctcgataaaggtgttgggttttctcaaatgcgttatttagtgcctgatttatcgataatttccctttatctccggcgatatccatcagatccatataactggcggtgtagttttgtagtacttgccgacgttcatcaccggtcatctgcaatgctttatagaccaccaaactttcattaaccgaatgaccgccatcaaacaccagaaacgccaacgtattaaggtaggcctgctcttgcgagaaagtaggatcttgactggcaatatagttattgagatgaaccatgatattggtcgagcccgatgcccccgtcaccacggaatgcccctgcgccaaggcgttacgctcaagcgttgtttcctgtccgggcgtcagcactctgcccgccgctacctttctgccatacaggaaatctccatactgatcaccagatggttggtagggcagtgcaataccataatcattggtttgctgttcagttaacttcactttataggtaacatccgccatattcgttaatttactactggtggaacgcgccttgtagatctcctcccgatagaaaatgtccgcttccgccttccattgagataaatgtaaccccataccatccgtgttcgacatttttaccgccagaaacggaatcttgatcatttcaaaaccgttatccaccttagtcatcatgatcttaaagttatccaaggtcggtttttgcaggaatgcggtcagttcaggcactcgactgaaccagggacgaatatcttttttaattttttcggcaaaagcttgcatcctgatatcaatctgtccgtcgagtacgggtgagtcagcagtactttgcatatacagctcaaactcctgcaccagaaactgacctatccgcctggaggtggctagcgcatccggtgacgccatttttaccaacgtatgggccacttcggaatcaaaacgacgaccaaataagttgtcaatatattgggtagttgacttttctctgtgagcatcagcctgtaatgacagtaccaaaccatgtaactcagggtatgcctgtaactgactggcagcatcatcaaataacttgatagtttccttcgaggtgacttgtccggtgagccagagtcccctggcccgtccaatcaaaaacctcgcttccgggatattcgcggtttccaatcggctcataaaagcaatcagactttcactttcggtcttaggcgcttcccgttcagcggttgaattcgttcgggtcaacggggtaatctgccattcaataagacgattaatttcgttttgtgttataccgccttttaaaccgacaacacgtccggttccatcaaagatgacgcgttgcgtaagatgttcagcatgttgaggtgccacggcgatcccaaggacgccagcggattcagctcgctgagcctgtaagtgctctatcattcggcccattttaaaacgtactaagttcacctgattggtgcgtagagcaaactcctttgggctatgctgttgccaatcagctatcgcccgttcaagcagcaatatatgctcttcatcgaaatggctcatcgtcttatagaaagtatcgcgtaccgtggccagcgccgtgctaagcttcctttttcgccccaatgttcgcacattgggattgataaatagcttgtttccctctttcaataaattaaattttgcattttcaaatatagcggaatttttctgctctaccttgacatcattccccaacgatttcagattaatgcctgaaatccgcggcactcttctgacacgctcacctgaactgttcgacgttggtatcaccctatcgtcagattgtcctttggcaaactttgaagtcgttaaaacgccggtattttccacgcgaatactggcatttatctgtagacgatcaaccgcttgtttagcatcatccaacgcttgtagctcttcttcggtcaatcctttgtagaattttttttcagcttccggtattaattcgggatcaatatagctaccggtttcccccgcgcctgtcgattcatagccattaccagacaaaccactaccaccggcaccggtacgatcaggttttgaatcgctctgttttgcccctctaacatcttcttgtacctgggcaattttattttcagccgcagcaatatcacgtttaccccgatattccgccccctgataggcgatatttgcatcattttccgccttttcggcccgttgttgttgcaataatgcttcttcttttcttaattctgcttttttctgagccgctgcaatatcttgttttgcactggcatgatgctgttcactttgtgctacgccgacctcggatttcttcaccgcttcttttacgtgttgttggttatccgtaatagcttgtcgggcatgcattaattttcgctgcgcaataaatttgatgtcattcaacttatcctgagcgtggtccaggaattggctagcaaattgattacgccattggtcacctgattggccgctgtaattggcatagtcaccaagcgcatccaaaccttgcgtcatagaaaccagtttgtcagtctccgcctgcgcttctgcttctattgcattacgctgtgtcagcccattttggctaactgctgcctgatcggttaattccaactgggattgcgatttcgcaatctccgccagttgtttctctttttcctgttccaacagtcggcgatctttttctgctttttctttatcgcttaacgcattttgcgccgctttatcctgtttcacatgttcggtaataatattggcttgttgtgagctcttagattttgcaataacgttatccagaatatagccgacaccatcactcaagcctgttcctttaaactcaatgcggttactgcccgcttttgctgtcagctctagtgttttattttgccatttcgcggcatcgccaaaagtcgagaatacaagtttgtcgttccagaaaacatccataccattgtcgactgaataagcatcgggacgattagcaaaatcaaagctcagcgaaatcacttctccctcagaacggttttgtagatcctggtaaatagtagtgtttttatcaacatcaagttcactgactcgttcgccataacgggtattattaggcccatcagtactcactgagctataggccgcaatatcattggttgattgccaatccaatttaccttgctcaaggtcattattgacaatcagtgacgtttcagatttcacaatgatattgtctaagatgtaactaaatccatcatcctgacctgtacctttaaattcaatccggttagtccctgcttttgccattaaatcgagtttttgagtgcgccatatagctcgcggtccagaagttgagaatacagacttaccattccacaataccattattccgctgccactcagatcacggtccaccctctcaaaatgactcataaaatcaaaagtcagtgaaaccacttctccttcagacaaattttgtaattcctgccaaattacggtgtttttatcaacatcaaatttactgactcgttcaccatcaccggtattatcaagaccataatcactcgctgggttatatgcctctataccatgagttgactgccaacccagctcaccttgttcaaaatcaccattgacgatcagattttcatcttgatctgacaccgatagcgttttttgactcaaagcaccttctattgaactgacgtcaggcgtctccaccgctgttatagcaccattgaaactatggtttaaatctgaacttatcggcgcaatttcatccatctgaaagccatcaataccagatacttccgctaaattaatcgcccctctgcctttgtgggtgcccgacgtgttagcttcctccccatgaaccaaatagttgattgcctgactgcctcccacacctaatgttgtctgtttgatatgctcaaagagggaagaaagtttgttgctattcgttacagagaagctgtagaaatcaccattaccaatcttaaccgccacattattacgtgcgtaggaagcattgatgcccagaccatcacccacatggatattggcattagcttggcctttcatgaccgccacattcaggccattgcccactttggtattaatattgtgcttaccccacgccaggttaaccgaaacgccattacctacgtgagtgtttatattcgcgtcaccatgagcagcggtgacatttaagccattgcccacagttgtcgttacgttagctttcccttttgccaccgtcacctgcataccgtctcccactttggtgacaatattgccttcgctccataaggcattaaagctgtctccctgacctacctgagtgacaatgttagccttgcctttcgccagcactacattacgcccgtcaccgattttagtgatgacattggctttgccccaggcaccggtgtaatcatcaccgttacccacatgggtaatgatattggcatccccctgcaccaccgtgacttcctgtcccttccccactttggtcatcaggttggctttacctttcgcgaaattataacggtcgccattccccacttgggtcaggatattcgcttccccccaagccgcattcaccccggcaccatcgccaattttggtgataagattggctttacctttggcaaaccccactgtcgtaccctcgccgacatgggtcatcacgttacccacatcggaaataagcaggccaactgtggtaccgtcgcccactttggtcagaatattgcctttgccaaacaggatagcggcagtcgtcgcatcaccgacatgcgtaataacgttcgctttcgccgccgcaacaacccccataaaatcatcacccactttggtgacgatattggcctcacccagtgccaagacccccgttaagccatcccccacatgggtcatcatattggctttaccaaacatggccgccagcgttgtgccattaccgactttggtcatcacgttcagttcaccggcaaacaaaccaatactggtgccattgcccacatgcgaatagatattggctttccctaccattaaggcagcggtcaggtcgttaccgactttggtcagcacattagccccgccaatcatggccgcaaaggtattgccctccccgacatgggtaaaaatattggctttgccgatcatcgccgccaacgtcatgccattacccactttcgtggcgatattgccctttgccagcatcagcgcaacactggtgccatccccaatatgcgtaaacacattacctgcggcgaccatcaatgccagcgcatcaccgtcacccactttggtaaaaatattacccactccccccattaatgcccatgcatcccctttgccgacatgagtaaacaggttacccgcgccaatcatggccgcaattgatgtaccctccccgactttagtgaagatgttccctgctgcggccatcacgcccagtgtcaaaccgtcgccgacatgggtcaacacgttgccaacaccaaacatgatgccggtcatgtcaccctttccaactttggtcaagatattcgcgccacccagcataacgcccgtggtattgccgtccccgatatgcgtaaggacatttgccccgccgcccatgaccgcctgcgtatggcctttccctttcttggtaaagatgttggctccgcccaacgcaatggcggtggtgttggtagtttcagtctcatcactgagatgagtgataatattggcaccgccaagcataccggcaaccatatctcccgcaccgagctttgttagcacgttagcgccacccaaaaatacggagaagatatcccctgttccggcctgagtgatgacgttaaaaccgcccgccccgaaccagttcgcgctaccatcacctatttgggtatgagtgttatatccccccaacatcagtacccggctgtcaccgttacctttgtggatcgagatattgccataggacagaaggtgggccagatatcgtccatccccgacccgtacgagaacattgaccgcaccaccagcgtaaacatccattttcccgcgctggctctggtgaaccaagacattggctaaacccgcaccacgaaatgatagatcgccctcttcaccgtttttcacaatgacgttagcacctccgcctccttcaaaatacgtattaccgaatgttgaactgtgcagaataatgttagccgctcccgctcctgtgaaattaatattaccgtgcgtcacattggatgtaataatgttgccaccaccagcaccgatgaaataaatattaccggaactatcaccgccattctttgatgatttgataacatcttgctcagaataaccttcaatatcagtcagacaatcagtaatctcatctgttacatttaaatcatagtgaagctgacttaatgtataaccagccccaattgattgataaccgcgaggataggaaaaacgttcatttgctaaacggccagtatggtcaccttttttataccaagatcttgcaatatatttcagctttcctgtttcatcatcattcgccagcttaacctcaaccactttggtataaggctccagaaatattgcatatacataagtatccggctgctggtttgatttcaccggagagacatcgattttcagcccattagacgagatcgcgtatccccccattttggcactacccagtgtgacgtttttcgctttaatgttagtaccatcggaataattcacccatttatcggttaataatacctcctcaacaccctgtactatggtttcttgtcgatataccacattaatattggcaagcgtaatagcatcgtcccctttaacggagataaatccattatttacgtcgatattttccttagcaatatccttaagatggttaccttccttataccaggaagtggcataataacggagcttaccggtatcaggattattttgcagccgtacagcgacaactttagtattaacattatcggcaatggcaaagagataagtatcaggctctacctcggatttaactgctttaacttgttgagattgttgaatcccgcgctcttccattgttgctgatgtcatcacaatatctttagcctgagcaaattctatttcatttctcgctcctgctcgggtaatttcgttataagctcctgcgccagtaaaatgaatattaccgtgagcaacatcagaatagagtttgttataaccccccgcaccttcaagagtaatatcaccctgtgtctgtccatactgatcttcactgtggcgtgtacgttcaatgcgattcgctgcccccgcaccatgcaagataatgttaccttctctacccttacgtacaatatgattatcagcaccaacaccattcaaagtgatatcaccgctttctatccgcgaatcgatactatttgcagcgcccgcgccgttaaatgtcacatctccttgagtaccctcataataattagaccaggtacggtcaattttattagccgctcctgcgccagcaaaataaacatttccctgatcagtttcatgccataattgattgtatccaccagcccctttaaaacgggtatctccagatgaacctttacgaaccagtttgttatagccagcagcacccgaataagataaatccccggtttcacccgtatgatcaataaaagccgtaccggctgcgccagaaaatgacaagccgccatttcctgttttactaataccggtataacctgaggcaccctttaccgaaagttcaccattcgtatggtatacatcgaccttaaatgaaccaatcgtaacatcatcatctccgccataagcataaacttcaccaccaataccaatagcaataatactattaccgtcattatcgtcgtaatatttcccagtaaagaagtactctgtacttctattcgatgattttcccatcaatagccctttaatttattattgaagttaagcagaaagccactgcacctaacaaatagggcagttattttgaatattcaagttctcacgaaacagtgaaatcttctgaatttttaatagcaaaaaatcaaataaagaaaaaaaccgctattaaaattaacatcagatattgtttgcacgaatttatcaaacatattttttacaaaaagtaatttattaataaaataaatataaaaaagaaaatattaagttcagaaaagtttcaatttaatgcatttataaacaccttaaaacaaatccatcgaatgagatataccctatggatttcgagatgcatcgcgacggcaagggaacaaatccccgggagcatagataactatgtgaccggggcagccaacaaagaggcaacttgaaagataacgggtataaataaaaaattcaaaaagagcgttaacacagatatttttttccgcgataatattgaaaatacagagaagagaataaagtaacgactaagctaagatataaaatttcatcaattacgatcaattattttattccatttccataaatatccacacagattatagctattaaaataatataagtaaactaaataataatatcctacttttttagtcaggaaataataataataacaaatgaaattaatcattagattcacataatgagtatttgttattcagcggtaaaaaaaagctcacctattctgtgagccttttttattactcattttaacttttattcttgagaactaattacgcaaactgcactttgcctctcgtggtatctgcccacgctgttgccatgacgattttcgtctgactcgccagattgtcaataaaaccattatcccccacagtgggtgcaaaactgctcattgcctggattaaggtatcaactgcattatccgacagcgcagtaaactcacgctctcccaaggcattcttatcccccatccgcatcaccagtttggcacggttaccattaaagtaatcactaaaggtgactgaacctattgattcaaagataccctgcgcggttttatcctgtgtaggacggtttactgataacaccagatcatatccactgcgctggaaccacaaatctttccagtcaatatcgttaaaggcaatcatatcttccgcattgatatcatcaacctgactgtcaatcacctggccactgaccacaaagctgtctacccctgcaccaccctggaaatggttctgataaccgcccagcactagcagatcctgaccctctccgccatcaaactggctgaacttcgaaatagtggccgctatcaggtggtcaccaccttctccgccattaattaccgcatgataacccatcagtttaataacatcgtcacccgtgttgccatcaattcgattgtcattaccaaacacccaaccaaagtcatggcctgcccccaattcaacccagttgttattaccgatggtcacggcataatcctgatcttcgccggtctccacccggttgtagtttcccgcagtcacaacataatcatacccgctaccggcatcaatcagcccgccttcaccaaaaacaaatgtctggtcattaccttcacccataaaagcatagttaatccgcccggctattaccgcggtatcatccccatgaccgccaaacatccagttctcacgtcccatcagaacgcccagatcattgccttcccccccggtaaagaggttagctgtgccgatggagtaataaacatcatctccgtaccctccccagaagttgttgttatcgcccagataagcaccgagatctttaccttcaccgccccagttgaagttatagttccccaacgagatatggatatcaccgtcccctcgcaggtggccgctgttaagcaggaaatcaaaggtttttccctccatattaagtagatccgcagtaagattctcttttagattggtcacgagtgacttcatctcttgttgtttatctttactgaacatcgtcgcaaacaagttaggcaaattcagcgaattaaaaccccatatccgctctggtttgttatccgcctgactattcccggtgttgatgtcgcccggtacgctttcttcccgatgttcatctggcgctttctctttcagcctatgactgacaagaaatgattcaataccatcagcactcatatcaatgttctgtttcaacccctcaatccatttatccggatcagcgaaaacatggaattgatcccccccaaactgcctaatcacttccagcatctctcgcaaaatcgcctggccatcaaccggctcgccggtacgggcaacaattcggccttttggggtataatccacgccaaaaatatccgccagcgtggtctctgcatttacaccggctaatcgccccagcagtctgtttttaagctgacgcggtaaatcctggggcttataggtaaatgtggtcttcgccatacccgttgttgaatattgctgcgtcatcaggccaaacaacgaacccaagttggtatccagaatcgactgaatatggtcaccgaacataaagttccagctaccggttgtgacctgaatgtccgccccttgaccacctaccgcaaaattgaaaatcagcttctcattggcccgacggaatttatccacacggctcattttattggtctcagtatcattgccgttattacttagccattggtagtactttttgttcaatgctgtttccatgtcactgttcaaaccccggctactgcgctcgtgctgcgcatccagatcaaccaacgtcttgtaatccacactgctggtttggtctaaacccgacatgttccacaaaaactttctcactcccgatatcgtccactgctgatcctgtgccgctaaccagttccactctgtgccggaacgagcaatagacttcagtacaccggtaatacgcgccgggccgtcaaatggattaaccagcagtggcgtagcgatagatttatccatcatgacaatcaagtcattactgcgtccctggttgaagctgatgttacgagtaccaataaacatttgcgccccttcaagcgcttgataaccggcaatctcgacgctgtgttcactgtcaccctccccgatgtgcgccatcacattgctgtcaccaaaaaccagtgacttaaagccgccggtacccactttgatccctacgttggaggttccccagttgatcgcggtaaactcgccatcgcccacatttatctgcatattcccggcgtaactcagcggcttacccaattgaggatttgaacccggctctatcctatttctgggcttccttggcgcagtgaacgcatcatggttatccgcaattgcccctctagtgactaaatccgctgccgtgtaccccacccgggcaaggttgatatcgctttctgctaccccacaacgttccagctctgttgtcgtcgcgagttctccctcttcattccagtacaacacccgtttgttatccttcaatttgttaacccactgatgatgtttatcgcgggcaaatttacggcctgttgcatcaacggccacgtcactacgatgcgctgaaacttcgctacggataccctgtttatctaaagcgataataaaacggtgggcaaaaccatgctgcttatcctcactgatcagtgaacagcccacgatgctgatgcgctcaggttcacctgccggcgcaaagtcctgactgaactgtttgagttttattgccaattcatcagcacggtaaccactcagacgagtgttattttgtgccgattcgtcgcggccatgccccacaatttgccaacgcaacttgccagataattcggcaggatcaccataaatgacatgatatttgccatccgcatccagtttaaccaccacgctggaatctgggtgcttacccgccagattaattgcggctgttgctacaatcgggtcattttccatctgaataatgagctgaccatcaaaacgggtcccatgattgtcactcttttgcctagagctcttcaccacattattaagtatcgtctgcgtctcatcactgatatagctgcgatcttctttaaaactataccgttcgctgttagataattggggtgctgggtttaaagcagttttatcccgtggcaaagtgctctcatcctcaatgaatactgactctgacgcgccatgtttatctggtaacgcctgcgatgccaccgtcggagagttgttccgttctctcttaggggaatatttccgataaaggtccagggttttctcaaatgcactatttaatgcctgatttatccattgttcccccttatcttcggcaatatccatcaggtccatataactggcggtgtaatgttgcagtacctgccgacgctcatcacccatcgcctgtaacgctttgtagaccgtcaaactctcattaaccgaatggccgccatcaaacaccagaaacgccaacgtattaaggtacgcctgttcccgcgagaaggtaggatcttgacgggcaatatcgttattgaggtgaaccatgatattggttgagcccgatgcccccgccaccactgaatgcccttgcgccagagcgttacgttcaagcgcggtttcccgtccgggcatcagcaccctgcctgccgtcacatttctgccaaataggaaattttcatacggatcaccggatggctggtggggcaatgcaataccataatcattggtttgctgctgagttaactccactgtgtgggtcacattagcataatgcgttaatgtattactggtcgaacgggccttgtagatctcttcctgatagaaagtatccgcttccgctttccattgagataaatgtaaccccatcccgtctgtgatcgacatttttaccgccagaaacggaattttgatcatttcaaacccgttatccaccttagtcatcatgatcttaaagttatccaaggtcggttcttgcaggaatgtgatcagttctggtgtctgactgaaccaggggcggatatcctgtttaattttttcggcaaaaacttgcatcctgaaagcaatctgtgcatcgcgaatagttgagccagcagtattttgcatatgcagctcaaactcctgcaccagaaactgacctatccgtctggaggtggctagcgcatccggtggcgcggttttcaccaacgtatgggccacttcggaatcaaaacgacggccaaataggttgtcaatatattgggtagtcgacttttctttataagcatcagcctgtaatgacagaaccaaagcatgtaactcagggtagccctgtaactggctgacggcgtcattaaataacttgatagtttcttccgatgtgacttgtccggtgagccagagttgtctggcgcgtccaatcaaaggcagcactgccgggatattggcagtttccaattgactcataaaagcaatcagactttcactctcagtcttcggcgcttcccgttcagcggttgaattcgttcgagtcaagggggtaattttccactcaataagctgattaatttcgtcttgggtgacaccgctttttaaaccaactacccgaccggttccatcaaagatgacgcgttgagtaaattgttccgcaaaccgaggtgccacggcaatcccaaacacccctacggctccagcgcgctgagcctgtaagtacgccattatccggtccatcctaaggcgtattaagttcacttcactgacgtatagagcgaattcctttgggctattctgttgccagtcagctatcgcctgttcaaaccgcaatacatgttcttcatcgaaatgactcatcgttttatagaaagtatcacgtacaacagtcagaactgcactacgcggccttttccatcccaatatttgtactttgggattgataaatagttgattgccctcttttaataaattaaattttgcactttcaaatattgcggaatttccctgctgttctaccttggtatcattccctaacgatttcaggttaatacctgaaatttgcggctctattatgacaaactcatctgaacggttcgatgccggcatcacactatcgtcagattgtccttcggccaacgctgaagccattaaaacgccggtattttctgcatgaataccagccattatctgtagatgctcaaccgcttgttcagcactctccagcgcctgtagctcttcttcggtcaactctttgtagaattttttttcagcttccggcacgaattcgggatcaatatggctaccggtttcccccgcgcctgtcgattcgtaggctttgcccgctaaaccgctccccttggcaccggcacgatcaggtctggcatcgctctgttttgctactttggcatcgatttgtacttgagcaatcttattttcagccgccgcaatatcacgtttcccccgatcttgctcctcctgataagcgatattggcatcattttccgcttcttgggcccgctgctgctgcaataatacctcttcttttcttaacgccgctttctgctgagctgctgcaatatcttgtttcgcaccggcatggtgctgctcactttgtgctacgccgacctcagatttcgcaaccgctttttcgatttgttgctggttatccgcaataacctgtcgggaataagctaatcttttctgtgcaataaatttggcgtaattcgactcatcttgaatatagctcaagaacttggcagcaaacggattgcgccacgggtcgcctgattgaccactgtaacctgcatggtcatcaagctccaccaaaccttgcgtcatggaaaccaatttgtcggcctcggcctgcgcttctgcttctatcgcattccgctgtgccagcccacttcgattcagcgctgcctgatccgttgattccaattgggattgcgatttcgcaatcgctgccagttgccgctttttttcctgctccaacaattgactatcttttcccgctttttctttatcgcttaacgcattttgcgccgcctcatcctctcttacatgttcgataatcacatcggtttgtagcggtttctcagattttgcaataacgttatccagaatataacccatgccatcattctcaccggttcctttaaactcaatgcgattactgcctgcctgtgcaattaattctaacgttttagttttccactctatcgaatttccaataactgagaatacccgttctccattccaaacaacttccatgccattttgaataacatcgatatcggaacgatgagcaaaatcaaaactcagtgaaatcacctcgccttcagacaaattacgcagatcctgataaatcgtggtgtttccctccacatcaagttcactgacacgtttaccatgaccggtattatcaagaccataattactcgctggaccatatacctctatattattggtaaactgccaacccaacttaccttgttcaaaatcaccattaataatcagattattattctgctctaatatcgatcgcgttttttgatttaaagcactttctattacatccacatcaggcatctctacccctgttacagcactattgagacgataatttaagtctgaatttaccggagaagttacatccatctggaagccatcaatagcggaaacttctgctaaatgaatcgcgcccctgcctctatgggtactaagcgtgttaacatcctccccctgcaccagatagtcgatcgcctgactgccccccacgccgagtaccatttgtttgatattgttgtagagagcggctagtttgttgctttctgtattactcgcggcaaccgccaggctgtaaaaatcccccccgcctatcttaatcgccgcattattgcgcgcataagcggcattcacatataaaccattccccacctgaatattcgcattaccctgacctttcatgaccgccacattcaggccatggcccactttggtattaacgttatatttcccccacgccacgttaaccgaaatgccatcacccacatgagtgttaatgttagcatcgccctgcgcggcagtgacatttaaaccgttgcctattgtcgtggtgacgttagctttccctttcgccaccgtcacctgcataccgtctcccactttggtgaccacattgccttcactccataaggcattaaagctgtttccctcaccgacctgagtgatgatgttggccttacctttcgccaacaccacattacgcccgtcacccactttagtgacaacgttggcttcgccccaggcgccggtgtaatcatcgccgttccccacatgggtgataatgttggcatcgccctgcaccaccgtgacttcctgtcccttccccactttggtcacgatgtttgcctgacctttcgcaaaggtgtaacggtcgccatttcccacctgagtcaggatattcgcctccccccacgccgcattcactccggtgccatcgccaattttggtgataagattagcgttaccgctaacaaatcctacagtcaaaccatcgccgatatgggtcatcacgttacccacatcggaaataagcagaccaattgtggtaccgtctcctactttggtcagcatattgcctttgcccaacaggattccggcggttgtcgcatcgccgatatgtgtaatcacattcgcttttgccgctgtaacaacccccataaaatcatcgcccactttggtgacaatattagcttcacccagtgctaacacgccggttaagccattccccacatgcgtcatgatattagcccgaccaaacatggccgccagcgttgtgcctttaccgactttggtcatcacattcagttcaccggcaaacaaaccgatactggcgccattaccctcgtgggtaaaaatattggctttccccatcattacggcggcggtctggtcatgaccgactttggtcagcacattggccccaccaatcatgactgtaaaggtattgccatccccgacatggctaaagagattggccaagccaatcatcgccgccaacgtcgtgccatcacccactttcgtggcgatattgccttttgccagcatcagcgcaacacttgaaccctccccaatatgcgtaaatacattgcccgcggctgccattaatgccagcgcgtcaccgtcacccactttggtaaaaatattccccaatccccccattaacccccaggcatcccctttgccgatatgggtaaacaggctgcccgcaccaatcagagccgcaatcactgtcccgtccccaactttggtgaagatattgcctgccgaagccatcacacccagtgcaaaaccgtcaccgacatgggtcagcacgttacctatgccgaacatgacaccggtcatgtctccctttccgactttagtcaaggtattagcgccacccagcatcacccccgtggtcttgccttcaccaatatgcgtaaagacgttcttaccgccccccatgatcgctaatgcatggcctttccctttcctggtaaaaacgttggctcctcccagtgcaatgatggaggtgttggcggtttcactctcctcactgagatgggtgataatattggtgccgccaagcataccggcaaccagattacccgtcccgagtttagtaatcgcgctagcaccgcccaaaagtacggaaacgatattcccagcacctttttgagtaatgaagttaaaaccgcccatcccaaaccagttcgcactaccattacctatctgagtatgcgtgttgtatccacccagcatccgtacccgactgtcaccgttgcctttgtggattgaaatattgccataggccaacagatgagccaggtattgcccatccccgatccgcaccagaacatttaccgcgccaccagcgtaaacatccattttcccgttctggccctggtgaaccacaacattagctaaaccggcaccacggaatgtcagatcccctttttcgccgttttttacaattacgttagcggtacccgcaccttcaaaacgaatatcaccgaatgttgaactgtgcaaaataacgttagcggccccggctcctgtgaaataaatattaccgtgcatcacgttggacataataacgttcccaccccctgcaccattaaaataaatatcaccggagctatcaccactactttctgatgatgtcataaggtcttccccgacatcattattaagatcagtcaaacaatcagtaatatcctctgttacatttaacttatagtgaagctgacttaacgtataacccgcttttattgattgataaccttgagaataggaaaaagtttcattcgctatgcggtcagtatagtcaccttttttataccaggatcttgcaatatatatcagtctccctgtctgactatcattcatcagctcaatttcaaccaccttggtataaggctcctgaaatactgcatacacataatgattcggatgaatgtttgatttaaccgcagagacatcgattttcaacccatgagaagagagtgcgtcctcttctatttccattttggcgctagccagtgtgatatcttccgctttaatgttgacctcacgggcataatgtatccatctatcgacaaataatctatctacaacaccctgtattgtggttttttgttgatatatcacgtcaatattggcaagcataatagcatcgttccttttaatggtaacaaatccattatttacattgatattttccctggcaatattcttaagatggtcgccttttttataccaagacgtggcataataactgagcttaccggtattcggattattttgtagccgcacagcgacaactttagtattaacattattagcaatggcaaagagataagtatcaggctctaccgcggatttaaccgcttcaactcgctgggattgttgaatccagcttccttccattgttgccgatgtcatcacaatgtcttgagcctgagcaaattctatttcatttttcacacctgatcgggtaattttgttataagcgcctgcaccagcaaaatgaatatttccgtgggcaacatcagaatagagggtgttatatccccccgccccttcaaaagtaatatcgccctgtgtctgtacatacttacctttaccgcgtatacgttcaatgcgattcgatgcccccgcccccccgtaagacaatattaccgcttctacctttacgcacgatatgattatcagcgccaacaccctgaaaaatgatgtcaccgctttctacccgtgaattgatgctgtttgccgcgccggcaccatcaaaaaccacattcccctgtgaacctgaataacgattaaaccaagtacggtcaatgtcattgtatgcccctgcaccagcaaaacctaaatttccctggttagtctcatgccataactgattatatccaccggcccctttaaaaccgatatcacccgacacccccttacgaaccagtttgttatagccagcagcacccatataagataaatccccggtttcacctatgtgatcaatgaaagttgcaccagctaccccctcaaatgacagtctgccatttcccgtcttactaataccggtataacctgatgccccttttaccgaaaggtcaccatctgtatggtatacatcgactttaaatgaaccaatcgtaacatcatcatccccgccaaaagcataaacatcaccaccaacaccaatagcagcaatcctattaccgttattattgtcgtagtgttttcctgtaaagaggaactctgcacttatattatttaatgatttacccataaatagtcctttaatttattatttgggttaaacagaaaatcactgtaactatatctaatggagaaaaccgttttttaatatttaagttctcatgaaacaatgaaataccctgatttttaatggagaaattttaaataaataaaaaacgctattaaaattaatatcaaatattacttacacgaatttatcaggcatactttccctaaaaggagtttattaataaaatggttgtaataagaaaaacacccagttcagaaagattgttaacgaaaatatttaaaatacagaaaggataataaagtaacgcctaaactaagacataaatcctcatcaattattttgttctatctccgtaaacaaccacacggattataaccattaaaagaatgaaagcaaataaaacaataacatcttacttttttacaaaaaaaactataacgaacaaaacaattaaacaattaaataattaaataattaaataattaattaaataattatcacttagaaaactataatggacatctattactccaaggccagatctaacatttttaatatggttattatgggtaaaaacaacctttttagcgctcaataaacatacaaaagagatatcaaaacctatccataaaatcatattgaatatgtgaaattatcaacatccgtgtggcgattaattttttatacaaagcagaatcccgccctgtccgttacttagcattaaaaaagacccatcgaatcggtgagccttttttattattcattttaacttttatttttgcgaattaattacgcaaactgcaccttaccctcagtggtatctgcccacgccgttgccatgacgattttcgcctgactcgccagattgtcaataaaaccattatcccccacagtgggtgcaaaactgctcattgcctggattaaggtatcaactgcattatccgacagcgcagtaaactcacgctctcccaaggcattcttatcccccatccgcatcaccagtttggcacggttaccattaaagtaatcactaaaggtgactgaacctattgattcaaagataccctgcgcggttttatcctgtgtaggacggtttactgataacaccagatcatatccactgcgctggaaccacaaatcttgccagtcaatatcgttaaaggcaatcatatcttccgcattgatatcatcaacctgactgtcaatcacctggccactgaccacaaagctgtctacccctgcaccaccctggaaatggttctgataaccgcccagcactagcagatcctgaccctctccgccatcaaactggctgaacttcgaaatagtggccgctatcaggtggtcatcaccttctccgccattaattaccgcatgataacccatcagtttaataacatcgtcacccgtgttgccatcaattcgattgtcattaccaaacacccaaccaaagtcatggcctgcccccaattcaacccagttgttattaccgatggtcacggcataatcctgatcttcgccggtctccacccggttgtagtttcccgcagtcacaacataatcatacccgctaccggcatcaatcagcccgccttcaccaaaaacaaatgtctggtcattaccttcacccataaaagcatagttaatccgcccggctattaccgcggtatcatccccatgaccgccaaacatccagttttcacgccccatcaggacacccagatcattgccttccccgccagtaaagaggttggaaataccgatggcgtaataaacatcctctccacgtcccccccagaagttgttgttatcgcccagataagcaccgagatctttaccgtcaccgccccagttgaagttatagttccctaacgagatatggatatcgccatcatcatgcaaatgaccactgttacgcaggaaatcaaacgttttctgctccatattgagcagatcggcggtgagattctctttcagattggtcactaatgacctcatctcttcttgtttatttctgttaaatatcgtcgcaaacaggttaggtaagttcagcgaatgaaagcccaatgcccgctctggtttgttatcaacctgactattcccactgttgataacacccggcacactttcttcccgattttcatcaggcgctttctctttcagcccatgactgataagaaatgatttaataccatcagcacccatatcgatgtgctgtttcaacccctcaatccatttatccggatcagcgaagacacggaattgatcccccccaaactgcttaatcatttccagcatctctcgcaaaatcgccgtgccatcaaccggctcgccagtacgggcaacaatctgcccttccggcgtgcaatccacaccaaaaatatccgctaatgtggtctctgcattcacactggctaaccgacccaacagtttgtttttaagctggcgcggtaagtcctggggcttgtaggtaaaggttgtcttcgctatacccgttgctgaatattgctgcgtcatcaggccaaacaacgaacctaggttggtatccagaatcgattgaatatggtcaccgaacataaagttccagctaccagttgtgacctgaatgtccgcccctcgaccacctactgcaaaattgaaaatcagtttttcattggcctgacggaatttatccacacggctcattttactggtatcaatatcattgctgttatcactcaaccatcggtggtattttttgttcaatgctgtttctgtgtcacttttcaaaccccggctactgcgctcgtgctgcgcatccagatcaaccaatgtcttgtaatccacactactggtttggtctaaacccgacatgtcacgcacaaatttttccgcacccgataacgtccactgctgatcctgcaccgctaaccagttctgctcttcaccagaacgagcaatagactttagtacaccggaaatacgcgcagtaccatcaaatggattaaccagcggtggtgtagagagggatttatccatcatgacaatcaggtcattactgcgcccttggttgaaactgatgttacgagtaccaataaacacctgcgccccttcgaaagcctgataaccacccagattaacactgtgcttactgtcaccctccccaatgtgcgccatcacattgttgtcaccaaaagccagtgacttaaagccgcccgtacccactttgataccgacgttcgaggttccccagttgatcgcggtaaattcaccatcacccacgtttacctgtatattcccggcgtaactcagcggcttatccgattgaggatttgaaccgggctctatcctgtttttgcgcttccttggcgcgatgaaaacatcatggttatccgcaattgcccctctggttactgaatcagcttccgtgtaccccacccgggcaaggttgatatcgctttcagccaccccacaacgctccctctctgttgtggccgtgagttccccctcttcattccagcacaacacctgtttgttatcgtccaatctgttaacccactgataatttttatcacgggtaaatttacgacctgttgcatcaacagccacgtcacttcggcgtactgaaacctcgctacggataccctgtttatctaaagcaaacataaaacggtaggcaaaaccattctgcttatcatcacttatcagtgaacaacccacgatgctgatacgctcaggtttacctgcctgctcaaagtcctgactgaactgttttagtttgattgccaattcatcagcacggtaaccactcaggcgcgtattattttgtgtcgattcgtcgcggccatgccccacaatttgccaacgcaacttgcctgacaatccggcaggatcaccatcaatgacatgatatttgccatccgcatccaatttaaccaccacgctggaatccgggtgtttacccgccagattgatcgcggcttttgccacgatcgggtcatcttccatctgaataatgatctggccatcaaaacgcgtcccacgattgtcattcttttgctgcgaattcttcaccctatcctgatttttatcttctttaaaaccatatagttcgttgttaaagaatcgggtcactgggtttaaagcggctttatcctgcggtgaagtaccaccatccttaatgaatagcgactctgacgttccatttttgcccgataacgcctgtaatgcttctaccggaacatcgttccgttttctctcaggggtattttctcgataaaagtgcagagttttctcaaatgcgctatttaatgcctgatttatccatcgttctcccttatctccggcaatatccatcagatccatataactggcagtgtagtgttgtagtacctgccgacgctcatcactggtcgcctgcaacgctttgtaaaccaccaaactctcattaaccgaatggccgccatcaaacaccaaaaacgccaacgtattaaggtatgcctgctcctgcgagaaagtgggatcttgacgggcaatatagttattgaggtgaaccatgatattagtcgagcccgatgcccccgttaccacagaatgcccttgcgccagagcgttacgttcaagcacggtttcctgtccgggcgtcagcacactgcctgccgccacctttctgccagacaggaaatcgtcatactgatcaccagatggctggtagggcagtgcaataccataatcgttggtttgctggtcaattaattccactgtgtgggtcacatcagcacgatgagttaatgtattactggtcgaacgggccttatagatctcacctcgatagaaaatatccgcttccgccttccattgagataaatgtaaccccataccatccgtgttcgacatttttaccgccagaaacggaattttgatcatttcaaacccgttatccaccttagtcatcatgatcttaaagttatccaaggtcggtttttgcaagaatgtagtcagttctggcacccggctgaaccaggggcggatatcctttttaattttttcggcaaaagcgtgcatcctgatagccatctgcccgttagtaatctgtccgtcgcggatagttgagctagcagtattttgcatatacaactcaaactcctgcaccagaaactgacctatccgcttggagacggctatcgcatccggtgacgcggttttcaccaacgtatgggccacttcagaatcaaaacgacggccaaataagttatcaatatattgggtagtcgacttttttttgtgagcatcagcctgtaatgacagtaccaaagcctgtagctccgggtatgcctgtagctggctggcagcatcattaaataacttgatagtttccttcgaggtgacttgcccgatgagccagagtcccctggcctgttcaatcaaaggcatcgcttccgggatatttgcggcttccaaccggctcataaaagcaatcagactttcactttcggtcttaggcgcttcccgttcagcggttgaattcgctcgggtcaagggggtaattttccactcaataagatgattaatttcgtcttgggtgacacttccttttaaaccgaccacccggccggttccatcaaagatgacgcgttgactaagttgttcagcacgctgaggcgacacggcaatcccaagcacctttgcggattcggcacgctgggcctgcaagtactccattacccggcccatcctaaaacgtattaagttcacttgattggcgcgtagagcaaattcctttgggctatgctgttgccagtcagctatcacctgttcaaactgcaatacatgttcctcatcgaaatgactcatcgttttatagaaaatatcacgtacagcagtcatcgcttgactaagcggccttttctgccctaatgttcgttcatcagggttgataaacagcttactgccctctttcaataaattaaattttgcactttcaaatattgcggaatttcccttctgtcctagcttgatatcatcccccaacgatttcagattaatgcctgaaattcgcggcactcttctgacaaattcacctggactgttcgacgctggcatcaccatactgccagattgccctttagcaaattttgaagcagttaaaacgccggtattttccgcatgaatactggcatttatctttagatgatcaaccaattgttcaacactatccagcgcctgtagctcttcttcgctcagcccctcgtagaattttttttcagcttccggcaccaattcgggatcaatatggctaccggtttctcccgcgcctgtcgattcgtaggctttgcccgataaaccactccccccagcaccggtacgatcaggtcgggaatcgctctgttttgctactttggcatcgacttgtacttgagtaatcttactttcagccaccgcaatatcatgtttaccccgatattccgccccctgataggcaatatttgcgtcattttccgcttctttggcttgctgttgctgcaataccgcctctatttttcttaattctgctttttcctgagccgctgcaatatcttgttttgcactgacacaatgctgctcactttgtgctacgccggcttccgctttcgcaactgcttttttgacttgttgttggttatccgcaatagcctgtcgggcattagctaattttttctgtgcaataaatttgacgtaatacaactcattttgaacatggttcaagaactcggccgcaaacggattgcgccacgggtcacctgattggccgctgtaactagcatggttatcaagcaccgccaaaccttgcgtcatggaaatcaatttgccagtctccgcctgcgcttctgcttctatcgcattgcgttgtgtcagcccattttggctaactgctgcctgatccgttaattccaactgggattgcgatttcgcaattcctgccagttgtttctcttgttcctgttccaacagttggcgatctttttccgctttttctttatcgtttaatgcattttgcgccgctttatcctgtttcgcgtgttcggtaaccacatcggtttgtagtgggttctcagattttgcaacaacgttatccagaacatagcctacaccatcattcaaaccggttcctttaaactcaatgcggttgctgcctgcccgtgcaattaattccagcgttttacttttccactctattgcattgccagaagctgagaatacccattgtccattccagaaaacttccatgccattgttgataacataggtattggaacgatgagcaaaatcaaaactcagtgaaatcacttctccttcagacaagttttgcagatcctggtaaatcgtggtgtttctctccgcatcaagttcactgacgcgttctccatgaccggcaataacaagaccataagcactcgctgaaccatacgcctctataccatgagttgactgccagcccagcttaccctgttcaaaatcaccattaataatcagattattattctgatctgatatcgatcgcgttttttgatttaaaacactttctattacatccacatcaggcgtctctaccgcggtcacagtaccattgagacgataatttaagtctgaacttaccggcgcaattgcctccatctggaagccatcaatagtagaaacttctgctaaatgaatcgcccctctgcctttatgaatgccaaacgtgttaacttcctccccctgcaccagatagttgatcgcctgactgcccatcacaccgagtaccgtttgtttgatattgttgaagaaagcggccagtttgttgctttccgtattactcgcggcaaccgccaggctgtaaaaatcaccctcacctatcttaatcgccacattattgcgcgcataagaggcattaaccgctaaaccatgacccacctgaatattggcgttactctggcctttcatgaccgccacattcaggccattgcccactttggtattaatattgtgcttaccccacgccaggttaaccgaaacgccattacctacgtgagtgtttatattagagtcaccatgagcagcggtgacatttaagccattgcctacggttgtcgttacgttagctttcccttttgccaccgtcacctgcataccgtctcccactttggtgacaatattgccttcgctccataaggcattaaagctgtctccctgacctacctgagtaattatgttggccttacctttcgccagcaccacattgcgcccgtcaccgactttagtgacaacattggctttgccccaggcaccggtgtaatcgtcaccgttacccacatgggtgataatgttggcatccccctgaactaccgtgacttcctgtcccttccccactttggtcatcaggttggcttgacctttcgcgaaattataacggtcgccattccccacttgggtcaggatattcgcttccccccaagccgcattcaccccggcaccatcgccaattttggtgataagattggcttttcctttggcaaaccccaccgttgagccttctccaatatgggtcatcacgttacccacatcggaaacaagcaggccgactgtagtaccgtcgcccactttggtcagaatattgcctttgccaaacaggatactggcggttaccgcattgccgacatgcgtaataacgttcgccttcaccgtggcaacaacccccataaaatcattacccaccttagtaacgatattagcctcacccagtgctaacacgccggttaaaccatcccccacatgagtcattatattagcccgaccaaacatggccgccagcgttgtcccctcacccactttggtcatgacattcagttcaccggcaaacaaaccgatactggggccattacccacatgggaatagatattggctttccctatcattaaagcggctgtctggtcgttaccgactttggtcagcacattggccccgccaatcagggccgcaaaggtattgccctccccgacatgggtaaaaatattggctttgccgatcatcgccgccaacgtcataccattacccactttcgtggcgatattgccttctgcctgcatcagcgcaacactggtgccatccccaatatgcgtaaacacattgcccgccgcgaccatcaatgccagcgcatcaccgtcacccactttggtaaagacgttcactgcaccgcccattagcgcccagacatcccctttgccgatatgggtaaacaggttgccagtaccagtcaaggctgcgatagatgtcccctccccaactttagtgaagatattgcctgccgcagccatcacgcccagcgtcaaaccgtcgccgacatgggtcaacacgttgcctatgccgaacataatgccggtcgagtcgccactcccgactttagtcaagatattcgcgccacccagcataacgcccgtggtattgccgtccccgatatgcgtaaggacatttgccccgccgcccatgaccgcctgcgcatggcctgtcccttttttagtcaggatactggcaccgcccaacgctattgctgtggtatttgacgtttcagtctcctcactgagatggctgataatattggcaccgccaagcataccggcaaccagactgcccgccccgagcttagtcagtgcgttagcgccacctaacagtacggaggagatgctcccttttcccgcttgagtgataacgttaaaaccgcccttccctgaccagtttccatcaccattacctatctgagtatgcgtgttatatccgcccagcatccgcacccggctgctaccgttgcctttgtggattgagatattgccataagccagcagatgagccaggtattgcccatccccgatacgcacaagaacatttaccgcgccaccggcgtaaacatccattttcccactctgaccccggtgaaccagaacattggctaaacccgtgccacggaatgtcagatcgcccttttcacctttttttacaatcacgttggcggcacccgcaccgtcaaaatgcgtatcaccgaactttgagtcgtgcaaaataacgttcgctgcccccaaccctgtgaaattaatatctccccgcgtgacatcagatttaataatgtttccgccccctgcgccgctaaaataaatattaccggaactatcaccgccactctttgatgatttgataacatcttgctcaaaatagcttttaagatcagtcaaacaatcagtaatatcatctgttacatttaacttatagtgaagctcacttaccgtataaccagctcttattaatcgataaccataaggataggaaaaagtttcatttgctatgcggccagtatggtcaccttttttataccaagatcttgcaatatacttcagcctccctgtttcactatcattcgccagcttaacctcaaccactttggtataagggtccaggaatattgcatacacataagtattcggctgcgtgtttgatttaaccggagagacatcgattttcagcccattagaagaaagtgtgtcccctcctattttggcactagccagtatgacatcttccgctttaatattgatcccacgggcataattcccccatttatcggttaataatgccttcacaacaccctgtattgtgtttttttgtcgatataccacattaatattggcaagcgtaatagtatcgtcccctttaacggggataaatccattatttgtattgatattttccttagcaatatcctcaagatgatcaccttgcttataccaagaagtggcataataacggagcttaccggtatcaggattatttcgcagccgtacagcgacaactttagtattaatattattggcaatggcaaagagataagtatcaggctctaccgcggatttaaccgctttaacttgccgagattgttgagtcccatctccctccattgttgccgatgtcatgataatatctttagcctgagcaaattctatttcgtttctcacacctactcgggcaattttgttataaacccccgtaccggtaaaatgaatattaccgtgagcaacatcagaatagagtgtgttatatccccccgcaccttcaagagtaatatcaccctgtgtctgtccatacttatcttcactgtggcgtatacgctcaatgcgattcgctgcacctacaccacgcaagagaatatcaccgtttctacctctacgcacaatatgattatcagtaccaataccatgcaaaatgatgtcaccgctttctacccgcgaattgatgttgtttgtcacgcctgcgccattaaatatcacatttccctgtgaatcttgataacgattaaaccaggtacggtcaatgttattgcctgcccctgcgccggcaaaatctaaatctccccggttagtttcatgccataactgattgtatccaccgccgcctttaaaactgctatcaccagataaacccttacgaaccagtttattataaccggccacacccgaataatttaaatttcccgtttcacccgtgtgattaataaaaaccgcaccggctgcccctgcaaatgacagcccgccatttcccgttttatgaataccggtgtaacctgaagccccctttaccgcaaggtcgccatctgtatggtatacatcgactttaaatgaaccaacggtaacatcatcatctccgccataagcataaacgttaccaccaataccaatagcagtaatactattatcgatattatcatcgtcgtcgtagtattttcccgtaaatatgtactctgtacttctatttgatgatttacccataaatagtcctttaatttattatttgggttaaacagaaaaccacggcacctaacggatgtacccgttattgagaatatttaagttctcatgaaatagtgaaatcttctgatttttaatagcaaaaaaattaaataaataaataaataaataaataaataaacaaccattaaaattaacatcagatattgtttgcacgaatttatcagacatactcttttccaaaaagtaatttactaataaaatggatataacaaggaaaacgccaaattcagaaagattattatcgcagatctctttctgcgataatattgaaaatacagagaagataatagagtaacaattaaactaagatataaaggctcgtcaattatttattccatctccgtaaataaccatgcagattataaccatcaaaacagtacaagtaaataaaataataacaccttacttttttggcaatgaaattataaccaataaaacttattaataaaaataattcttgaacagtgaactataatataatgaatatctattaccccgcagtaaaaaaggctcaccgattctgtgagccttttttattattcattttaacttttatttttgcgaattaattacgcaaactgcaccttacccacagtggtatctgcccacgccgttgccatgactattttctcctgactcgccagattgtcaataaagccattatctcccacggtgggcgcaaaactgctcattgcctggattagggtatcaaccgcattatccgacagcgcagtaaactcccgctcccccgaggcattcttatcccccatctgcaccaccagtttggctcggttaccattaaagtaatcactaaaggtgactgaccctgttgattcaaagacgccctgcgcagttttatcctcaatatgacggtttactgataacaccagatcatatccactgcgctggaaccacaggttttgccagtcaatatcgttaaaaacaatcatatcttccgcattgatatcatcaacctgactgtcaatgacctgaccactgaccacaaagctgtctactcctgcgcccccccggaagtcgttctggtatccccccagcaccagcagatcctgaccttcaccgccgtcaaactggctgaatttcgacattgtggccgctatcaggtggtcatcaccttctccgccattaattaccgcatgatagcccatcagtttaataacatcgtcacccgcgttaccgtcaatctggttgtcattaccaaacacccgaccaaagtcatggccttcacccagctcaacccggttgttattcccgatggtcacggcataatcctgaccttccccggtctccacccggttgtagttgccggaggtaacaacgtagtcgtccccgttaccggcatcaatcagcccgccttcaccaaaaacaaatgtctggtcattcccttcacccatgaacgcatagttaatccgcccggctattaccgcggtatcatcgccatgaccgccaaacatcccgttttcacgccccatcaggacgcccagatcattgccttcacccccggtaaagaggttggaagtaccgatggcgtaataaacatcctctccgcgaccaccccagaagttgttgttatcacccagataagcgccgagatctttaccgtcaccgccccagttgaagttatagttccccagcgagatatggatatcgccatccccttgcaaatgaccgctgttacgcaggaaatcaaatgttttctgctccatattgagcagatccgcggtgagattctctttcagatgcgtgactaaggagtgcatttctgtctgcttatcttgactgaacatcgttgcaaacagattaggcagattcagagagttaaaaccaaatacaggttttgctttatcatcggcctgagcacttattccattgatgctgactggcaattctgatccacggttttcatccggggctctctcttgcagaccatgactttcagcaaacgatctgatgccatccccgcccatcgccatgcccgctttcaaaccatcaagcaacttctccggatttgtaaacgctttcagttgatcgccactaaattctgcaatcacggccagcatctctcgcagaatcgcttcgccattaaccaggtctcctgtacgggaaaccatctgaccttccggggtgtaattcacgccaaaaatatccgctaaggtcgtctccgcgtttacaccggctaatcggcccagcagcttattcttaagctgacgcggcaaatcctgtggatgataggtaaacgtggtcttcgccatacccgttgccgaatattgctgcgtcatcaggccaaacaacgaacccaggttggtatccaaaatcgactgaatattatcaccgaacatcaggttccagttacccgtggtcacctgaatatccgctccccggccacctaccgcaaagttgaatgccagtttctcattgacctgacggaatttattcgcgcggctcattgtgcccatatcactcacattgcgggtgagccactggttgaattttttattcaacgtcacttcaatatcttgcttcaaaccacggctactacgggcatgctgtgaatccagatcaaccagcgttttatagtccacgctgctggtctggtccaaaccggacagatccagcacaaattttttcgcaccggcgagggtccattgctgatcttgcgccgccagccactcctgcttttcaccaaaatgagcaataccttgcaagaccccggaaatacgggcggtaccatcaaacggattaaccagcggcggcgttggcagagatttatccatcatcacaatcaggtcattactgcgcccctgattgaaactgatgttacggttgccaataaacatctgcaccccttcaagcgcctgataaccggcaatatcgacgcggtgtttactgtcgccattgccgatgtgcaccatcacattattatccccgaaaaccagtgacttaaagccccccataccgactttgacacccacgtttgaggttccccaattgagcgcggtgaattcgccattccccacccccacctgaatattacccgagtaacttagccagttattcgagatatcacttgaatcggtctcaatgttatttttgcgtttctctggtgcaatgaaaatatcggtattatccacaaccgcccctctggccggcatctccgcatccgccatgccgacacgcgaaagatggatatcgctttcagcaatatgatgacgcacgcgctctgaacgggtttcaagttcgcctttttcattccaactcaggacgactttgttatcagccagcttatggatccattgacggcgttcattccaggtaaatttacggccgtccacatcaacggcgactgcactacgacgagccgaaaccgtcgtctgaataccctgctcctttaaggccgtaataaagtgacgggcaaaaccatttcgtttgtcatcacttatcagcgaacaacccacgatgctaatgtggtctggtttacccgcctgactaaagtttcgagtgaattgtttgagtttcacggccagctcatctgcactgtaactacccagacgagtgtaattctgctctgatttgctacgaccatgccccacaagttgccaacgcaacttgtctgatggtttaagttgagataaatcgccgtagacaacacggtatttaccctcagaatcaagctgaaccacgacactggaatctgggtgtttacccgccagattagccgctgcttcggcgacagcaaggtcatcctccacctggataatgatctgactatcaaaatgcgtttcacggccatcggtttgtggtgttacctcggcggtttgccagagctcaacgggcttatgagctaactttaccgctggtgcgacttgcaaactattaagcaattgaacacgcggcacattggcaacatcattatatctacgcaagccccccttggtaataagctgattcagtaacgaagtgccgccatttttcaccacagccgtttccaataccttatttttgccagataatgcggttaaatcttccacaggcgtgtggcttttctttttcgctattatttcaagctgagcctcctgaagtgcctgagcatagttaaacaactcggttggcgtccagacaccaaactttggcagccacttatggccgacaagtttatctgctccccctgcttttaatattctggcaacaatgcttgaacagttattcctcagcagttggtaatgttcattaggatcattgctgattttacgccatttcgcctgcattgccgccacatccagaccttcaagattaatacgaaatacgcgcccttgatcggcttcgcggtctctaaagttctgaatatccgccaactctcgctctttaaattgacgaatgacattggcagtacgtttttctatcaattgagggtcttgaacatttttattggcttggtatcgcagttcttccgcaaaaaacctgccaacatctgccctctcgtgttcataaccattccacatgtcaacaaatggctggtatatctgtttaggaataccggatgattgcagcaatctaggatctgccaatgccatcatagtaaagtcttcagtaacatctttgaaggcgacatctaccccttgtgcccattctagcctgctagtgaaacgttgtaatttatagtcaccatatctcaaaccgaacttatcgcgctcttcgtaggcgacatctatttcaagggttctatgattcaacaacggccaccaactggcataatttctcttattgataaagcctgcgatgtccgcattaacatgcgcacgcccctggccaatttgcattgcgccgtggcctaataggctatgagcgcttggtttccaaacaaacagtgtggcacttattggagataaatattgctcaatcgcctgatggatctttcttaaaccagagacatcaatacctttcccgtcattcgataaatcgctggctttcagattcgagaagacggcatctgaaatatcttgaccatattcttgaataaccgccgctttgacttgctcaaccgccttatcagcactttccgctttctgattaatatgaatattttccttaccccgagtaacaaaatcaccgttttcatcaatataaaggtgttttgaatctttaagattggcactgccaagctgatcatacagcctactgaaatcgccttgccctgggatttttacggtggacccagcaaagaccatcgactcattaaagcacgtgtcaatttgagacaataaggccctcatcgccggtacacgacctgagtcaggatgacctaagaggtatccttcaacttgttggcgcaaatcggataattttctaaccacattcaatatatagtcttttctgccttgttggatattgtgataactctctagcgcatcaatgacttttttgtaattatcaccacgaattttgcccaccaccgatgccgcttcctgaaactcacttaccgacatcaactttggcaagggtttccaagcgctatccacattctccgtaagaattttagtatttctttgatgattaaatacaatccggtcttcaatgaaatataactcatcgggtaacctcgtattatcgttaccattatcaaaccactggtcgacatcgacgattttttctaaataacgtttcgtaattatgctacacatagccccatccaacccattgttatacatagaattatgagtggtataagatgtagcgctattttgaaatcttatttagtacgacaacgttgagctcttttttttcactttcccccaattcttccagattaacaccagaaattatcggcacttttctaatgagttcacgcgtctcatgtaaaggagatcccataatgctgtcagattgtgtttcaacagaccgaggaattagcgaaacaccggtattttttgcgcgaattcccgcgttgatctgcaaccggctaacagcttgtttcgcactcgccaacgctcgcaactcttcttcggtcagcccctgataatatcggtttcccgcttccggcattgattccggatcgatatggctgccggtttctcccgcgccagttgactcataggctttttctcctgacaagccgctgccacttgcaccactgcgaacaggcttgtcattgctcagtttcgcccctttagcatccgcctgagtctgagccgctttattttccgccgccgcaatatctcgctgaccccgattttctgcattctgatacgcgatattggcgttatccttcgccttttccgcttgctgctgttgcaaaagcgcttctttttctctctgctctgcttttaattgcgcctctacaccatcaagaatagccttatcacgattttgtttacctttttccgttccggctgctgatagcaccacggtatcttttactttttgctgtatatcaatagcatcccgatggatatccgccagccgtttttctaatgtcggcttaatatcatccaatcgtttctggatgtcctcagagattccacccgcatagtcgagataatggctctctaactcacgactctcatcagtttcatctttaagtgctttaaatttgtccgcgagtaaagtcagctcttccgtcacggcctgcgcttctgcttctatcgcattgcgttgtatcagcccattttggctaactgctgcctgatccgttaattccaactgggattgcgatttcgcaattcctgccagttgtttctcttgttcctgttctaacagttggcgatctctttccgctttttctttatcgcttaatgcattttgtactgctttaccctgtctcacatgttcggtaaccacatcggtttgtcgtgggttctcagattttgcaacaacgttatccagaacatagcctacaccatcattcaaaccggttcctttaaactcaatgcggttactgcctgcccgtgcaattaattccagcgttttactttgccactctattgcatttccagacgttgagaatactcgttttccattccagaaaacgtccataccattgttgataatataggcattggaacgatgagcaaaatcaaaactcagtgaaatcacctcgccttcagacaagttttgcagatcctggtaaatcgtggtgtttctctccgcatcaagttcactgacgcgttctccatgactggcaatatcaaaaccataaacactcgctgaaccatatgcctctataccatgagttgactgccagcccagctcaccttgttcaaagtcaccattgacgatcaaatttttactctgatctgacaccgattgcgttttttgactcaaagcaccttctattgaactgacgtcaggcgtctccaccgctgtgacaacaccattgagatgatgggttaaatctgaatttaccggcgcaatttcatccagttcaaaaccatcaatagcagaaactttcgctaaatgaatcgcccctctgcctctatgagtgcccgacgtgttaacttcctccccctgcaccagatagttgatcgcctgactacccatcacaccgagtaccgtttgtttgatattgttgaagaaagcggccagtttgttgctttccgtattactcgcggcaaccgccaggctgtaaaaatcaccctcacctatcttaatcgccacattattgcgcgcataagaggcattaaccgctaaaccatgacccacctgaatattggcgttactctggcctttcatgaccgccacattcaggccattgcccactttggtattgacgttatatttaccccacgccacattaaccgaaatacccttacccacatgggtgttaatattcgcgtcgccatgcgcggcggtaacatttaaaccgttgcctattgtcgtggtcacgttagctgtccctttcgccgccgtcacctgcacaccgtctcccactttggtgacaatattgccttcgctccataaggcattaaagctgtctccctgacctacctgagtgattatgttggccttgcctttcgccagcactacattgcgcccgtcaccgactttagtaacaacattggcttcgccccaggcaccggtataatcgtcaccgttacccacatgggtgataatgttggcatccccctgcactaccgtgacttcctgtcccttccccactttagttacgaggttggcttgacctttcgcgaaattataacggtcgccatcaccaacctgagtcaggatattcgcttccccccaagccgcattcaccccggcaccatcgccaattttggtgataagattggctttacctttggcaaaccccactgtcgtgccctcgccgacatgggtcatcacattacccacatcggaaataagcaggccaactgtggtaccgtcgcccactttggtcagaatattgcctttgccaagcaggatactggcggttgtcgcatcaccaacatgcgtaataacgttcgctttcgccgccgcaacaacccccataaaatcatcacccactttggtaacgatattggcctcacccagagccaagacccccgttaagccatcccccacatgggtcatcacattggctttaccaaacatggccgccagcgttgtgccattaccgactttggtcatcacgttcagttcaccggcaaacaaaccgatactggggccattgcccacatgcgaatagatattggctttccctaccattaaggcagcggtcaggccgttaccgactttggtcagcacattggcacccccaatcatggccgcaaaggtattgccctccccgacatgggtaaaaatattggctttgccgatcatcgccgccaacgtcatgccattacccactttcgtggcgatattgccctttgccagcatcagcgcaacactggtgccatccccaatatgcgtaaacacattgcctgcggcgaccatcaatgccagcgcatcaccgtcacccactttggtaaaaatattacccactccccccattaatgcccatgcatcccctttgccgacatgagtaaacaggttacccgcgccaatcatggccgcaattgatgtaccctccccgactttagtgaagatgttccctgccgcggccatcacgcccagtgtcaaaccgtcgccgacatgggtcaacatgttgcctatgccgaacaggatgccagctgtgtcgccctttccgactttagtcaagatattcgcgccacccagcataacgcccgtggtattgccgtccccgatatgcgtaagaacatttgccccgctgcccatgaccgcccgcgcatggcctttccctttcttggtaaagatgttggctccacccaacgcaatggcggtggtgtttgacgtttcagtcccctcactgagatggctgataatattggcaccgccaagcataccggcaaccagactacccgcaccgagcttagtcagtacgttagcgccgcctaacagtacagaggagatgctcccttttcccgcctgagtgatgacgttaaaaccgccagacccagaccaatccgcgctaccattacctatctgagtatgcgtgttatatccgcccagcatccgcacccggctgctaccgttgcctttgtggattgagatattgccataagccagaagatgagccaggtattgcccatccccgatacgcacaagaacatttaccgcgccaccggcgtaaacatccattttcccactctgaccccggtgaaccagaacattggctaaacccgtgccacggaatgtcagatcgcccttttcacctttttttacaatcacgttggcggcacccgcaccgtcaaaatgcgtatcaccgaactttgagtcgtgcaaaataacgttcgctgcccccaaccctgtgaaattaatatctccccgcgtgacatcagatttaataatgtttccgccccctgcaccgttaaaattaacgtcaccactgcttgcagataatttcacaagatcttgctgatgatattctttgctatgcactaattgatgggcggtacggcgcactgtattgatgtcatattgaagctgacttaatgtgtaaccggagccagcagaggcatacccgttatcataggaaaactcttcattggctaaatcacccgtataatcgcctgttttataccaggctgttgcgatgtattttagttgctttgtttcgggatcattggccaactgaacttcaaccactttggtatagggtcccaatactttggcatacacataagtattgggttttcggttcgatttgactgcggaaacatcgactgtgctaccatcagaaaagacagcatacccccccattttggcatcgcctagcgagatatcctccgctttaaccatcatgccacccgtataggttacccactgatctgacaacaggttttcctcgatagcatggatcgtgacgggttgcagacgctcaaagattaaaccggagagatgataagcgccattagcatttaccgtgataaatccattgcctgacgaaatttctttcgccgcaagattttcaaggtgattgcccgctttataccaggaagtggcataataaccgagtctgcccgtggtgggattatttcgcagccgaactttactgattttagtgtacattttgtcagcaaaggcaaaaagataggtatccggctcgacggttgatttcatccctgtaacttgctgagactctcgtatccagcttccttccatcgttgccgtcgttaatacaacttctttggctttagcaaactccagtgtctcatcatcgaaatcgctattcgcatctattctggtgattacattgtaagcccccgcaccggagaaattaatattgccatacgcgacatcagaatagagctggctataaccgccgacaccttcaaaagtaatatcaccgcgggtctgttcatactcgtctttattttggtatacacgctcaattcgattcgatgcccccgcgccacgtaagataatattaccctctttacctttacgtacgatgtgattatcagcaccggccccgttgaatgtaacattaccgtgttctacccgcgagctgatattgtttgcagcaccggtgccattaaacgtcacatttccctgtgaatcttgataacggttaaaccaggtacggtcaatatcattgcctgcccctgcgccggcaaaatctaaatctccccgattagtttcatgccataactgattgtatccaccggcccctctaaaacgagtatcaccagacaaccctttacggaccagtttattataaccggccgcacccgaataatttaaatttcccgtttcacccgtgtgatcaatagcagctacaccggcagcccccgtaaatgacagcccgccatttcccgttttatgaataccggtataacctgatactccctttaccgtaaggtcgccatctgtatggtatacatcgactttaaatgaaccaacggtaacatcatcatttccgccataagcataaacctcaccaccaataccaatagcagtaatactattaccgtcattatcgtcgtaatatcttcctgtaaagaggtacactgcacttctatttgatgatttacccataaatagtcctttaatttattatttgggttaaacagaaaaccacggcacctaacggatgtacccgttattgagaatatttaagttctcatgaaatagtgaaatcttctgatttttaatagcaaaaaattaaataaagaaaaaacccaccattaaaattaatatcagatattgtttgcatgaatttatcagacatactttttccaaaaagtaatttattaataaaatggatatatacccgtcatctttcaagttgcttctttgttgactgcactcgctcaccccggtcacatagttatctatgctcctggggattctctcccttgccgccgcgatgcatcttgaaatccatagggtataacaaggaaaacgccaaattcagaaagattattatcgcagatctctttctgcgataatatcggaaacacagagaagataataaagtaacacctatgatataaaacttcgtcaattatttattccatctccgtaaataaccatgcagattataaccatcaaaacagtacaagtaactaaacaaccacctactaaagtaggtgggttagtgattaacggactgaaagtccggatacgcgtcggctaaacgacgcgtcaattatccatcctgaaattatcattcggattgggttcaaaatgatgttctaaatagcttttgatcatttcctccgttaactgccccaccgttgcacaaaaatagcctcgcccccaaaaatgttggccccagtaccgctttttcaaatgcgaaaattcttcaaacagcttactggccgttctccccttcagccttctcatgatttcacttggcgctaatgttgggggactgctgacgagtatatgcacgtgatcttgactcacaactccctttaatattctgatttcaaaggagccgcatgtctgacggattaattctcgcactcgacttgccacttctcctgtcagcactttgtatctgtatttcgttacccacacaaaatggtattcaatctgaaataccgtgtggctgccatatctgtaatccatgttgcacctccggtacaacacagtatcgcagctaaagctgaccggctaaagccggtggttttaacctttcatttggaagaataaaataataacaccttacttttttggcaatgaaattataaccaataaaacttattaataaaaataattcttgaacagtgaactataatataatgaatatctattaccccgcagtaaaaaaggctcaccgattctgtgagccttttttattattcattttaacttttatttttgcgaattaattatgcaaactgcaccttacccacagtggtatctgcccacgccgttgccatgacgattttctcctgactcgccagattgtcaataaagccattatctcccacggtgggcgcaaaactgctcattgcctggattagggtatcaaccgcattatccgacagcgcagtaaactcccgctcccccgaggcattcttatcccccatctgcaccaccagtttggctcggttaccattaaagtaatcactaaaggtgactgaccctgttgattcaaagacgccctgcgcagttttatcctcaatatgacggtttactgataacaccagatcatatccactgcgctggaaccacaggttttgccagtcaatatcgttaaaaacaatcatatcttccgcattgatatcatcaacctgactgtcaatgacctgaccactgaccacaaagctgtctactcctgcgcccccccggaagtcgttctggtatccccccagcaccagcagatcctgaccttcaccgccgtcaaactggctgaatttcgacattgtggccgctatcaggtggtcatcaccttctccgccattaattaccgcatgatagcccatcagtttaataacatcgtcacccgcgttaccgtcaatctggttgtcattaccaaacacccgaccaaagtcatggccttcacccagctcaacccggttgttattcccgatggtcacggcataatcctgaccttccccggtctccacccggttgtagttgccggaggtaacaacgtagtcgtccccgttaccggcatcaatcagcccgccttcaccaaaaacaaatgtctggtcattcccttcacccatgaacgcatagttaatccgcccggctattaccgcggtatcatcgccatgaccgccaaacatcccgttttcacgccccatcaggacgcccagatcattgccttcacccccggtaaagaggttggaagtaccgatggcgtaataaacatcctctccgcgaccaccccagaagttgttgttatcacccagataagcgccgagatctttaccgtcaccgccccagttgaagttatagttccccagcgagatatggatatcgccatccccttgcaaatgaccgctgttacgcaggaaatcaaatgttttctgctccatattgagcagatccgcggtgagattctctttcagatgcgtgactaaggagtgcatttctgtctgcttatcttgactgaacatcgttgcaaacagattaggcagattcagagagttaaaaccaaatacaggttttgctttatcatcggcctgagcacttattccattgatgctgactggcaattctgatccacggttttcatccggggctctctcttgcagaccatgactttcagcaaacgatctgatgccatccccgcccatcgccatgcccgctttcaaaccatcaagcaacttctccggatttgtaaacgctttcagttgatcgccactaaattctgcaatcacggccagcatctctcgcagaatcgcttcgccattaaccaggtctcctgtacgggaaaccatctgaccttccggggtgtaattcacgccaaaaatatccgctaaggtcgtctccgcgtttacaccggctaatcggcccagcagcttattcttaagctgacgcggcaaatcctgtggatgataggtaaacgtggtcttcgccatacccgttgccgaatattgctgcgtcatcaggccaaacaacgaacccaggttggtatccaaaatcgactgaatattatcaccgaacatcaggttccagttacccgtggtcacctgaatatccgctccccggccacctaccgcaaagttgaatgccagtttctcattgacctgacggaatttattcgcgcggctcattgtgcccatatcactcacattgcgggtgagccactggttgaattttttattcaacgtcacttcaatatcttgcttcaaaccacggctactacgggcatgctgtgaatccagatcaaccagcgttttatagtccacgctgctggtctggtccaaaccggacagatccagcacaaattttttcgcaccggcgagggtccattgctgatcttgcgccgccagccactcctgcttttcaccaaaatgagcaataccttgcaagaccccggaaatacgggcggtaccatcaaacggattaaccagcggcggcgttggcagagatttatccatcatcacaatcaggtcattactgcgcccctgattgaaactgatgttacggttgccaataaacatctgcaccccttcaagcgcctgataaccggcaatatcgacgcggtgtttactgtcgccattgccgatgtgcaccatcacattattatccccgaaagccagtgacttaaagccccccataccgactttgacgcccacattcgaggttccccaattgagcgcggtgaattcgccattccccacacccacctgaatattacccgagtaacttagccggttattcgagatatcacttgaatcggtctcaatgctatttttgcgtctctccggcactgtgaaaatatcggtattatccacaaccgcccctctggccggcatctccgcatccgccatgccgacacgcgaaagatggatatcgctttcagcaatatgatgacgcacgcgctctgaacgggtttcaagttcgcctttttcattccaactcaggacgactttgttatcagccagcttatggatccattgatggcgctcatcccgggtaaatttacggccagtcacatcaacgtcaacgtcactacgacgagctgaaaccgtggtgtgaataccctgcgcctttaaggcggtaataaagtgacgggcaaagccatcccgtttgtcatcatttatcaaagaacagcccacaagactaatgtgatcaggtttgtgcgttatgcttttagccaaattagcgtcctgataaaactgcgttaatctggtcgccagttcatcagcggtataaccactcagacgcatgttattttgctctgacgcatcacggccatgaccgacaacttgccaacgcaactgaccggataatcgggcaagatcgccataaaccacacgatatttgccctcagagtcaagttgaaccacgacactggaatccgggtgtttacccgccagattagccgctgctttggcggctacagggtcatcctccatctggataatgatctgaccatcaaaacgagtttcacgaccatcaatttgcggcgtcaccgccaccatctgccagtcatcaaggggtttgctaattttttcaccttgatgatgagtatcgtcgatgatagcaggctttaacgcctcttccttaccagataacccgtccagcgcttccaccgcagggcgatgttgcggtttcacccagacatgtttccgataaagcgcctctgtgtctttaaacgcattatccaacgcctgactgacccaaactttacctttctcaccgacaatatccaccaagtcccgataattgacggtgtagctattcaatatctgcttacgttgtccatcagtggttgcctgtagtgcctgataaaccaccagactttcgttgacagaatgaccaccatcaaataccaaaaatgccagcgtattgagatagccctgctcagccgagaaagtaggctgtttacgagcgatatatttattgaggtgcaccatgacattggtcgagccagacgcgcctgtcaacaccgcgtggccgtgcgctaacccattacgctcaaatgtagtttcccgtccgggggttaagatccgcgccacggcaatatttctgccatacaaaaagtcatcatatttgccattcgcaggctggtggggcagcgccgtaccataatcgttggtcttcatctttccagttacttcaacttcgtacgtgacgttcgccccgacagtcagtttagtaccgagcgaacgggcttcgctgataacatcataataaaaacgatcaccttcaaccttccacgccgccctatccatccccatttcctttgtgcccgccattcttactgccagaaatggtaccttaatcacagcaaaaccatcatcaacctgagtcatcatggtcttgaaattggcaaaagtcggttcgtccagaaacgtcatcaattcaggcactcgactaaaccaggggcgacagtcccgattgatgaccttgacaaaactctccatcgtttcagcaacaatcttctcacgctcggtgacatcaggataacgaccctctacccactgttcaaattgctctaccagaaattgtcctgtctgccgggctgtggtcatagcatcctgtggcgctgttttcaccaattcatcggccaactcagaatcaaaatggcggccaaacaggttgtcgatatattgtcccgtggccttttctttacgggcatccgccagtaactgttgagctaacgtgtgtaattcaggatatgtctgcaactgggtagcggcatcctcaaatagcttaatggtttcctgttgtgtgacttgtccgctaaaccaaaggtttttggcccgctcaactaacggcataccttcggggatcgcttcctgttgcaatcggctaacgaaaacgataaggctgtcactttcagttttaggcgcttcccgctctgccacagagttagtctgagtcaatggcttgatttgtaaatcagtaagacgattaatgtcgctttgcgcgatgtcgcctttcaagcccgccacacgcccaaacccatcaaaggatacctgttggtcaaactgtgcaacatggtcaggtgccaaactaatccccagaaccccgacggattcagctctttttgcctgaaggtaggcaaccagttcccccatttcaaaacgcaggcttttgactaaccgaccacgcttggcaaactcatgaggatcatgctgttgccaatgagcaagcgcttgctcaagctgcaacacatgctgttcatcaggttgttcgaccgcattgttgaaagcctcacgtactccctctagcgccttactgggccgatcggtatttatctgaccaaaatatcttttcgttgaatcaataaaccgtttgtcatcctgactcagcaagaaaggctcaaactctctcaggatggaaaaatgggatttaaggctatctccacccgtaatttgccctaatccttgcaaattgatacccgacattacaggtgcttttgcgattaattttctgggttgatttgagataggttccacaaccctagtgtatgacgttccgctaaacagagaaatgaccgaagcaccggcattttttgcacgaattcccgcgttgatctgcaaccggctaacagcttgtttcgcactcgccaacgcctgccattcatcttcggtcagcccctgataatatcggtttcccgcttccggcattgattccggatcgatatgactgccggtttctcccgcccctgttgactcataggctttttcttctgacaagccgctgccacttgcaccactgcgaacaggcttggcattactcaacttcgctcctttagcatccgcctgggtttgagccactttactttccgccgccgcaatatcacgctgaccccgattttctgcattctgatacgcgatattggcgttatccttcgccttttccgcctgctgctgttgcaaaagtgcttctttttttctctgctctgcttttaattgcgcctctacaccatcaagaatagccttatcacgattttgtttacctttttccgttccggctgctgatagcaccacggtatcttttactttttgctgtatatcaatagcatcccgatggatatccaccagccgtttttctaatgtcggcttaatatcatccaatcgtttctggatgtcctcagcgattccactcgcatagtcgagataatggttctctaactcacgactcccatcagttttgtctttaagtgctttaaatttgtccgcgagtaaagtcagctcttccgtcactgcctgagcttcttcttttatcgccgctcgctgcacttgcccattctggttaagtgctgcctgatttgttgattctaatcgggattgcgatttcgccatcgcggccagttgcttctctttttcttgttctagaagctggcgatctttttccgctttttctttatcgtttaatgcattttgtgccgctttaccctgtttcgcgtgttcgataacagccttagtgagtcgtgagctcttagatttagcaacaatattatcgagaatataacctgtaccatcatcctcaccggttcctttaaactcaatgcggttactacctgtttttgctgttagctccagtgttttattttgccatttcgcggcaccgtcaaaagccgagaatacaagttttccattccataaaacctccatgccactgtcggtaagagcagcatggagactattggcaaaatcaaaactcagtgaaatcacctcgccttcagacaagttttgcagatcctgataaatcgtggtgtttctctccacatcaagttcactgacgcgctcgccatatccctctgtttcaaggacataaatactggctgggtgatatgcttcaataccatgagtggccaaccaacccaactcaccttgttcaaaatcaccattgatgatcagattaatttcctgttccgaatcatcgctttcattaatattcaatgaatgatgaatattttcgagatcaggcgtttcggccgcggtgacagaaccaagcaaacgattgctcaaatttgaacttactggcgcaatttcatctatatggaaaccctcaatagcagaaacttccgctaaatgaatcgcccctctgcctttatgagtgcccgacgtgttagtttcctcccccttcaccagatagttgatcgcctgactgcccatcacaccgagtgcagtttgtttgatattgttgaagaaagcggccagtttgttgctttctgtattactcgcggcaaccgccaggctgtaaaaatcaccctcacctatcttaatcgccacattattgcgcgcataagaagcattaaccgctaaaccctgacccacctgaatattggcgttactctggcctttcatgaccgccacattcaggccattgcccactttggtattgacgttatatttaccccacgccacattaaccgaaatacccttacccacatgggtgttaatattcgcgtcgccctgcgcggcggtaacatttaaaccgttgcctattgtcgtggtcacgttagctgtccctttcgccgccgtcacctgcacaccgtctcccactttggtgacaatattgccttcgctccataaggcattaaagctatctccctgacctacctgagtgattatgttggccttgcctttcgccagcactacattgcgcccgtcaccaactttagtgacaacattggctttgccccaggcaccggtataatcgtcaccgttacccacatgggtgataatgttggcatccccctgcactaccgtgacttcccgtcccatccccactttagttacgaagttggcttgacctttcgtaaaagcgtaatggtcgccatttcccacctgcgtcaggatattcgcttccccccaagccgcatttacgccggtaccattaccaatctgcgtgatgatattggcttttcctttggcaaaccccactgtcgtgccctcaccaacatgggtcatcacgttacccactttggaaatcagcaggccaactgtggtaccgtcgcccactttggtcagaatattgcctttgccaaacaggatactggcggttgccgcattgccaacatgcgtaataacgttcgccttcaccgtggcaacaacccccataaaatcattacccaccttggtaacgatattggcctcacccagtgctaacacgccggttaaaccctcccccacatgagtcattatattggcccgaccaaacatggccgccagcgttgtcccctcacccactttggtcatgacattcagttcaccggcaaacaaaccgatactggggccattacccacatgggaatagatattggctttccctatcattaaagcggctgtctggtcgttaccgactttggtcagcacattggccccgccaatcagggccgcaaaggtattgccctccccgacatgggtaaagagattggctttaccgatcatcgccgccaaggtcataccattacccacttttgtggcgatattgccttctgcctgcatcagtgcaacgctggtgccatccccaatatgcgtaaacacattgcccgccgcgaccatcaatgccagcgcatcaccgtcacccactttggtaaagacgttcactgcaccgcccattagcgcccaaacatcccctttgccgacatgggtaaacaggttgccagtaccagtcaaggctgcgatagatgtcccctccccaactttagtgaagatattgcctgccgcagccatcacgcccagcgtcaaaccgtcgccgacatgggtcaacacgttgcctatgccgaacataatgccggtcgagtcgccactcccgactttagtcaagatattcgcgctacccagcataacgcccgtggtattgccgtccccgatatgcgtaaggacatttgccccgccgcccatgaccgcccgcgcatggccttttccttttttagtcaggatattggcaccgcccaacgctattgctgtggtgtttgacgtttcagtcccctcactgagatggctgataatattggcaccgccaagcataccggcaaccagactgcccgccccgagcttagtcagtgcgttagcgccacctaacagtacggaggagatgctcccttttcccgcttgagtgatgacgttaaaaccacccttcccggaccagttcccatcaccattacctatctgagtatgcgtgttatatccgcccagcatccgcacccggctgctaccgttgcctttgtggattgagatattgccataagccagcagatgagccaggtattgcccatccccgatacgcacaagaacatttaccgcgccaccggcgtaaacatccatttttccgctcttgccttggtgaaccaagacattggctaaaccggcaccacggaatatcagatcgccctttttacctttttttacaatcacgttggcagcacccgcaccattaaaatgcgtatcaccgaactttgagccatgcaaaataacgttcgccgcccccgctcctgtgaaattaatatctccccgtgtgacatcagatgtaataacgtttccaccacccgcaccgttaaaattaatgtcattactgcttgcagataatttcacaaggtcttgatgatgatattctttgctatgcactaatcgatgggcggtacggcgcactgtattgatgtcatattgaagctggcttaacgtgtaaccggggcagacagaggtatacccgttagcataggaaaactcttcattggctaaatcacccgtatgatcgcctgctttagaccaggctgttgcgatgtatttgaggtgctttgtttcgggatcattggccaactgaacttcaactacttcgatataggatcctatgactttggcatacacataagtattgggttttcggttcgatttgactgcggaaacatcgacttttccctgatcagaaaagacgacatacccctccattttggcatcgcctagcgagatatcctccgctttaaccatcacgccacccgcataggttacccactgatctgacaacaggttttcctcgatagcatggatcgtgacgggttgcagacgctcaaagattaaaccggaaagatgataagcgccatcaacgtttatcgcgataaatccattgcctgacgaaatttctttcgccgcaagattttcaaggtgattgcccgctttataccaggaagtggcataataaccgagtttgcccgtaatgggattattttgcagccgaactttgctgattttagtgtacattttgtcagtaaaggcaaaaagataggtattcggttcgacggttgatttcatccctgtgacttactgggactcttcgatcccgcgtcctcccatcgttgccgtcgttaatacgatctcttcagctttagcaaattccagtgtctcaccatcgaaatcgctattcgcgtctattctggtgattacattgtaagcccccgcaccggagaaattaatattgccatgcgcgacatcagaatagagctggttataaccgccaacaccttcaaaagtaatatcaccacgggtctgttcatactcgtctttattttggtatacacgctcaattcgattcgatgcccccgcaccacgtaagataatattaccctctttacctttacgtacgatgtgattatcagcaccggccccgttgaatgtaacattaccgcgttctacccgcgaattgatactgtttgcaacaccggcaccattaaatatcacatttccctgtgaatcttgataacggttaaaccaggtacggttaatgtcattgcctgcccctgcaccagcaaaatctaaatttccccggttagtttcatgccataactgattgtatccaccggcccctctaaaacgagtatcaccagacaaccctttacggaccagtttattataaccggccgcacccgaataatttaaatttcccgtttcacccgtgtgatcaatagcagctacaccggcagcccccgtaaatgacagcccgccatttcccgttttatgaataccggtataacctgacactccctttaccgtaaggtcgccatctgtatggtatacatcgactttaaatgaaccaacggtaacatcatcatttccgccataagcataaacttcaccaccagccccaacagcagtaatacgattaccgccattatcgtcgtaatatcttcctgtaaagaggtacactgcacttctattagatgcttttcccatcaaaaatccctttaaatcatacaagagggtatctccccgccctctggctacgccagccgctattcggttacggcgggacatccacttaatgtcaaaaaattcggagtgtttaacgtcaagtttacacactccgataactacttatcccctatctgaaggaagggcctgcgctcagtgctatttgatcaaacaaattgatcaaacaaaaaaccactgtacctgacgaatacagcggttattttgaacatccagcttcccgcggacagtacaagctttctggcctttccacggcaaaaagacacggcggcgcaaatccctggcaacttcacgcccgtgaccaaaaggcgcaatcatttcaggaaaaaagatatgtggacctgagcgccagtctgtgtggataagctctctttctcccgaaagaagctcatctcgattctgctcagataaaaaagcccaattacaaaaggcgattgggtgcccttgtccatctgcatagtagcaaaactgattcagttcaaatgcaggcaagatacgctgttgccactcggacaccaggtatcttcgatgcagaggagaatactggctcagcagcatcactcctccaatcattgcctgaatttctgcggtattcagtttcgctggttgatgtataatcgccatgcgctaatcaaccatgagattttattttgtatttttagataggcgttttttagcgttagccggctcttccactatagattccgatgcaatttgctcttcagccacttgtggcgcgggtaaaaaccctgctgcaactaatttatcaaattcagccgccattcgtggatcttccaacatatttttaaccatagaaaccatatacataaatcctgatgctggcatatggataacttgctttaattcaagttcattatcattttctgccattatcccattcgccatacgattaggttcttgaccaacgaaataaagagaaaaaacacctttattataattaacactagagatggtttgtacgaatttttcagacatatttttatttaccaaaaataaacaacttattaatgaagttatacaatgtatacaacaaagaatacatttgattcacggatatcttgaatttttatatctataaatacattaagagtaaaaaaatcaataaaataatatagagaaaaaacttaaaatcaacatttacacacaaaaagtccttttaccccacatatatagtcccatttacccacatcgataatgacgataaatataagataataagtaacacttaaatgctacacaaaattaatataattacttgttttaattcgtattttgtggattttaaagatattttttcatgaatgaaattgagaaattgactatagcatcattaagattaatattgatgatatataatagaaaagaaaacatcactgacattgataacttaaaaaaatctaattgttactattcatatataagtaatatagaggaaaaatttaatttatcgatttcaagtaaaaattccgtaagcaaaaagcaccataatatacttttacccgcaatcttgtttgataataatggcctaccttttgttttagccaaatcgaataaagagagctcactaatacagagggttgataaagaaaatcctgaaatatggtccgaagaaaggctgataaaagagtggaatggaaaatggattaaaataaaacagaaacaagctaaatttaacatccgttggtttattccagaatttctggcacaaaagaaaaatctatgtgagatactgttattttcctttgtgttacagattcttgcgctaatttctcccttagttattcaagtggtaatggataaggtcttaatccaccaagcgctatcaacacttgatgtattagtctttggcttaatcatcgccggcatcatcgaggtgattttacgtggattacgagaataccaatacgctcacaccgcaaaccgcattgatattaaactgggattaaaactagtccggcatctgttcgggctacctttactcttttttaaatcccgccaagtgggagcgattgttactcgggtgcgtgaactggacaccgttagagaattcctgaccggctcaatgttcaccttatctgtcgatgttctatttatgtttattttcatctacgtgatgagcctgttatccggcctactaacttgggtttttctcgcaaccttccctttttatgccattttggcgtggtgggtgacgcctcgtatggaaaaagcggttgaacaacaattcacccatgcagcaataaatacctcttttctgactgaaacggtctctggtgctgaaaccctgaaaagtctggcggtagagcccaaattcgttcgccgttgggatagccagactgagaagatggtagatactagttttgcagtacagcaactgggtaatcgctcaaaccatattgttatgctactgcaaaaagttaccggtgcggcaattctctggttaggcgcatcagaggttttatcactgcaaatgaccctcggtcagttgatcgccttcaatatgatggtcaaccacacttcccagccattagccaggttggtagaactgtggggacaattcatcagaacacgggtagccgtagataaattaggagatatgttaaacctgccaaccgagcaacaatccggccagcagcaggtagcactgcatggtgcagtttcgtttaacaatattgtctttcgctatcaacctgatattccgccaactatcaaaggactgacccttgatatcagagccggagaagccattggtatcgtaggtacttccggttctgggaaaagcacgctggcacgtttattactccgcctttattccccggaaaccggcgcaatcaccatagatggcattccattgcaaaacatagggatcgaaacactcagacaacaagttggtgtggttctgcaagaaaatttcttatttaataaaacagtatatgaaaatatcgctcagtcgaaacccgatgccagcctagaatcggtgattaaagtcgccaaactggcaggcgctcatgaatttattctcaggctgccgatgggatatgacacaaccattgcagaaggcgggcaatctttatctggtggtcagcgtcagcgactggctattgcccggactctcctcgctgaccccaaaatcctcattcttgatgaagcaaccagtgcgcttgatgacgagtcacaatcacgcattcaatcaaatatggcagaaattgcccaaggcagaacggttatcaccatcgcacaccgcctttcaactgtacgtcattgtgatcgcatcattgttcttaaacagggggaaattctcgaacaaggctctcatgaacagctacttaaccacggtagacagtaccggaagctctggcagttacaacaagaattaaaacaggagatgccttgtcatgattaaagcgtttaagaataaaattaaaacctggttgcgcccttgtccgcagcactatgactttttaccgacacatttagcattgtcacaacgaccaccgtcaccttttgcccgctacactgcaatcacgctcagtatcggcattatcatggccttgctctgggcctatctgggtaagttggatgttcaggcaaccgcaaccggtcgcctgattgtctctggccgttctcagataattcaggcatacgaacagagccgggtgaccgctatccatgttcagaatgggcagcgggtagagaaagacgccccactgctgacactcaacacactcggtgttaaccaagatatcacccggttattaaagcagatcgaatatcaagcccacgaaaaaattcgttatcaagctttgacagaagagcaggaaccgacaaaacaggagctgtttcaggctttgccggtatctcaacaaacacaagttgctgacaactattcccgggagaaaagagaatacgaagcggttgtaacaaatctgaaagcagagatgaacgtcaatctctcttctcaacaatcacgaaaaagcgatatcaatgcgctcactaagctccgacaaaatatcagccagcgtttaaaagcacgtcaaaccttaagtcaaaaacaagtgatcagtaaagttgaatatcttgaacaggaaaaagagtttctggaaacagaacgcctgattgcccaacaaaatgcggagtttcatgttctgcaatcgcaatatattagcctggaagagcgcttaaacagcctgaaaacacaaaaagagcgcgaatggtttgataaaagaaaacaggccgaagttcaattggtcgttttagagcaagagctggcaaaagctcaggtacgggaacaacttgaagtcattcgctcccccgtcacaggaacagttcaacaactcagcgtccatacattaggcgcggtactgcaaccagcacaaaacttgatggtgatcgtccctgatgacaatgtgcagttggcggaagtgcaaattttaaacaaagacgccgggtttgtttattcggggcaacaagtcaccattaaggtcgatgctttcccttatacacgttatggcacgattgacggcgaactgttgagtatatccagagattcaaccaccgatgaacagctaggattggtctttcctgctcaagtgagccttaaacgtaatagcattgccatagacgatacccaggttgaaattaccccaggaatgtcaatcgtcgctgaaatcaaaaccgaccaacgccgcgttatcgattatctcttgagccctatcagagagtatcaatctgaagcattgagggagaaataatcgtgaacctattaccttcttctgctactgactccagtaactacactcataatcaggcgctgaattgcatcgtctatgtggggaaacaatttcataagtcagctactgtcgatcaacttcaacacagcctgggttttgactccttatatctgagtgaactacagctgcgtgaagccgccaacgctattgggctacacagtaaaattgagcgattaactgtcaacacagggccaacattacccttaccggcattgattgagctggaacaacggtggtgggtactcattgaagtcgagaatgacaatattaccattctcgatcctgtgactgaacaaactcaatcgctttccctatctacatctacgggtaataaagagaatgtatataagattcttttaatcgcagatcaggaattaactaagaagcatgtcaaattcggcttgagctggttttatccctccattttccgccagaaaagtcagataagagatctgtttttgtttgccatggttctccagttatttgcactggccagtccgatcttgtttgaaaacatcatcgataaggtattagtaggacgaagtttatctagcctgcatgtattaggtatggctatgctcgctatcgcccttgccgaacccttgtatagctttatgcgcaacaccgtgtttgggcacatggcaagccagataaattccgagctctccgggcgactgtatcgtcatctggcaggattgccgctgcaatattttaagcaacggcaaacagggcagatcattgccagagtcagagagatgtctcaaatccgccagtttctgacaggttctaccctgatgctgttgctggatttaattttcgtcatcatgtttattggcatcatgttttattatgcctggatactaacctggattgttattggctcactttttgtttacttcatattctgggtagtcgccgggccggttattcgccgcaaagtagaagcagaatatgaaaccgatgcaaatgcaacaagctttctgactgaagccgtcactgggattgaaaccatcaaaaccaccgctactgaaaaccgtttcttacatcagtggcagcgtattctcagccaacagttgactaaaagcttcgcggcacagaaaagcggtttaatcgcaggacagggaatcgattttgtccagaaatttacctccgcgatcctcctatggtggggggtgaccgaagtcttacgcggtgaactgactccggggcaacttatcgccttcaatatgctggccggacacgtcacgcaacctatcctccggctggcacaggtttggcaggattttcagcatacgttaatcgcgttgaaacgtgtgggggatattcttgatgagccaatggaaaacagtaaacagggattggcttctgtacctgagctggaaggccaaattgaattcaaaaatattcgcttccgctaccatgacgatacaccggaagttctggcgaacctgtcgttattgataaaatcgggtcaatttattggtataactggaccgtccggttcaggtaaaagtactctcacccgtttgctacaaaggttatacgtacctcaacatggacaagttttgattgatggcatggatttagctattgctgatcccgtctctttacgccgcaatatgagtgttgtgctccaggaaagtatcctgttttctggcagcatcaccgataacattcggctgtgtaagcccaacgcaacagatgcagaagtctatcgtgccgctgagttagccggggccattgaatttattcaatcccttcctcacggttttgcgcatccagttggggagaaaggagtcaatctttcaggtggtcaaagacagagaatcgcattagcaagagcgctcttggtcaacccaaccatcctgatccttgatgaagctacctcagcattggactatgaatctgaagcggcaatcatggcaaatatggacgaaatatgccgtaaccgaacagtgatcagtattgctcacaggctcaatacaattcgccacgcggataaaatctgtgtgttagatcaggggcaaattatcgaatttggctcacatgaccaattgctccagcaaggcggcttatacgcgcatctgtggcatcaacaaattggcgaaaactaaatggcaattcagccaattcttaacaaagacggaataagttttggctgaaattattttttattttacttgtttgttcaaaaaaaataactcaatgtaattaaattattcaaattgttacaataagttattaagatgttagataatgaaatatcttgatacatcttaatttttaagttggagaattcttatggacaggaatccagtttctttaagcgtgttagtattttcaggaggatctctgacttctatcactggcccaatagaaattttaaccactgccgctcgtttagccggagcgccggagccagaaatcaatattgtcacacaggataatcaggacgctgtcgggatgggtggtgttcggctaaaacccaataaactcataggagaaataaaacaaacagatattgtcctggtgggttcaattggggccccttattgcgatttcgatctttgtactcaagaaaccttagattggctccagatgatggaagaaaaaaatgttcttatcgtctccgtttgtacaggctcttttgtactggctaaagctaatttactcaataaccgcaaagccaccacacactggctatttaccaaattatttaaggacatgtttccgcaagtacagttacattcagaaataaaagtcaccagcgataacaatattttttgtacttctggtacctatgaatacaacgatgtcatgatgcatattattgaacagatatatggtcaaaataccagggaaacctgtagtcagctcatatttggtaatatggaaggcctcccctctcatactctcgcaagttttgtaccctatcgccaacattcagatacattaatccacaaactacaagactggatgcattctgccccatcagacagattatcggttggcaatttggccgataaaattcatctgtgtgaaaggcaaatgaagcggcgctttaagactgcaaccggccagacaccgattcaatatatccaacagattcgactatctctggcgaaatgccggttagaaaaatcgaataagaccatagaagaaatcagccatgaagttggttatgaagatactcgctatttcagagagttattcaagaaacttaatgggttaacaccaatagagtaccgtagaaaataccaacaccgctaaaacggaaactcaagcataatcctttacagataagcaatgacgccgcttttatctttgtcaggcagtagcgatacactagaagctggggtatcatggcgtgctatattttatggtatacgccctttactaattgaatttatggcaaaagaacaaatggatcgcaccactctggatttgttcgcaaatgaacgcagaccggggcgcccaaaaaccaacccactttccagggatgaacaactcagagtcaacaagcgtaaccaacttcgccgtgataaggtgcgtggtctgcgtcgtgtggagctgaaaataaatgctgatgcagtagacgcacttaactttcttgcacagcaacgcaacatcagccgcagtgaactcattgagcaaattttgctggcccagttagcagaaagtaacaccacgacttgatagcattgaaggcacgaaatcacacaaatttgacagaattgtcctgactgtttagtcagaataggattttgcttttttattaatacaatcagaaccttttttactgatttttaacattttatacgtatatctcatacagaaatacacaaataaaacaagaggttatattatcctatggcaattataggtatattttttggcagcgataccggcaacacggaaaatattgccaaaaagatccaaaaaattctgggttccgacattgcagaagttcatgatattgccaagagcagcaaagaagatatcgaacagttcgatattctattgctcggcatccccacctggtactacggtgaagcacagtgtgactgggatgatttcttccctactctggaagagatcgattttgaagggaagttggtcgctctttttggttgtggtgatcaggaagattacgcggaatatttctgcgatgctatgggaaccatccgtgacattattgaaccccgcggtgccattattgttggtcattggccaaccgagggctatcacttcgaagaatcaaaaggtctggctgatgatagccactttattgggcttgctattgatgaagaccgccaaccagaattaacagaagagcgtgttaatgcctggactaaacagatctacgaagagctgagtttgtcagaaattcttgcaggatagcggcctatcccagtaagcgtaattggtgcaggccatttcttatcaatagtgaacccacggtaggtgagaagtgactcgcttcactcaccctgtgggatcgcattcaaaggctattacttttgtcaaaacacggcttaaatccgctttttattaccaagaatggcaaaaaatagcctaaacatgataaatagtaaggttattcctgcgttttataaacgattattctggcaaaatgtgtaatgaaagttaaggttaacgtggttttcattttcattagccatgcctataatcataatctgataactaactggtactttttgcagtatcactaagttcactttactgagtaacaggactgaatccgcatgaccgacaacaataaggcattaaaagatgctggacttaaagttacacttcctcgtctgaaaatattggaagtgttacaggagcctgaataccaccatgtcagtgcggaagatctctacaagaaactgattgataacggtgaagagattggacttgctactgtctaccgcgtgttgaatcagtttgatgatgccggtattgtcacccgtcataactttgagggtggcaaatcggtttttgaactcactcaacaacaccaccacgaccatttaatctgcctggactgtggtagagtcattgaattcagtgacaaatatatcgaaagacgccagaagaacattgctgagcgttatgggattaaactttcaaaccacagtctttatttatatggtcactgctctgccggtaattgccgcgaagatagtagtgcacatgacgagaagtaattcactcctgagtttttatccacctagagaggggaacccgccagggttcccctaaaggggctatattttcaggttgattcgggcctgtcaaaaatgagctataagccaagctctgagtgagagccaagacggacaaggcacaatgtgtccgcatcgggtttctgataaatcagtatcaagtcaggcttgatatgacaatctcgaaaatccttccaatcaccagaaagagcatgatcgcaatatttcggctctagcaaactatcagaagctaataattcaatcatcagcatcagtacgtcatcaagaacttcacgatgccgacctttcttttctctcttgtaatctcgcttgaattggcttgcgtagtcaatcgtccgcattaagatcagccattaaatcttttacagtggagaatgatttaccgcaacctttgcgagcttctttcattgcagctattgttgtctcatttggtactaacggttcaaaaggtaacactttttctcttgctacccgcgttaacatcatgcgaacagcatctgatacagtcaaacccatagcagccagaacagcagctgcctctgtcttaatctctccatcaatacgggtttgtactaattggtttgtagccatataagatctcccattgaattacattgtaatgcaaatgtaattcaatgaatgtctataatcaactttcgctcaatacatgaagaggtaattgaatttcatctattgaaaaatttttacataactaacatcataaatataactgtagtttatccaatttacccatttttcctctgaatctgtagtacgagcctgtcgggcaactcgatatcgagacacaacttgttaccaatcacctcaacgtaatgtttgaaatggcgaggtttttcagaaattagtctcattgaggaacccgccagggttcccctcttgctacaacattatcatgcctttacattatcaattcgactgtaacgtttaccgtccgggctgacagaacggatcaacacatcacctctcactcttgggcgtttatggttgttataaacttcccagttatgaccgccatccgtcgaatactggattaccaatccaggcagagcaacattagcccgcaaaataccccgttttaccttagcccccggaaccggtagacggtaagcaatgcccgctttatccagtttactaagctcacgttgccctatcaggttagcgaaccgggtccagtcacgattaagcgcatctatatcgactttatacgtttctccacgcttatatacctggcccggaatataatccaactcccaaccggcccggtgccatgcccgttccgctagcggcaacaagcgcggataaatcatatattccatctgctcatcagtccgaaccgtttcactccatccttgacctgaaagcccataggcacccggccacggtttatcacttttcgcactgaatgcattaccatcacggtcaacggaagtttcagcattttgcggtatgttattgggcgcaaaactaaagatcttagcttcatcgttaaaacgagccgcccaataatagccacgttcttgtggatgaacttcatatggcatatccagataaatataatctgggctagatatcaccacgtcatagcccttattcgcccaatcattgactgaatcaaagccgccatcgtagagagtgtcccaaaaattcaccccaacgcgtttggtggcaaaatctttagcactgctagcatgttttaaaccatcctgccatgcctgcatcctctcgataccattagcattcacaattttgctcacttcaattgcgaagtcgctggcaagatgatcaatgtctttcacaacaccctgttctatcaacttctgacaaatctgagacttagcccacggtttatcttccgcacttttatcaatgatgcccttacccggtacgataggaccatttttatcctggaatccgtctcccaaacggatattcttcgcttcatctcccccaaaatgccaagtctccaatggtgaacctgctactttatgcatagcagcaatttcacctatgactttctcaacaaaccgttttgaagaatccatacacgggttcaaataactgcggcgatcatagagctgaaccgatgttgctctggtggtatccgttggatcgagcaaacgatattcactcgcccctttcacattcccctgagcaattaattttttatagcgggcttccatagaaacaaccgcggcacgagcatgggctggcatatcaatttcaggaataacgtcgatataacgagctttagcatatttcagaatatcaatgtaatcttgacggctgaaatatccgctccccatgttgttgttatcggggcctgaacccaattgtggtaataaacattgagtttcacttaaatcatgacaccgctggctgccaacttccgtcaactcaggtaatccaggaatttccaaacgccaaccttcatcatcagacagatgaatatggagtttattcagtttgtaacttgccatttggtcaagcaaacgcagaacagcctgtttactgtggaaattacgccctacatcaaggagtgcaccacgatattcaaagcggggcgcatcttttgccgtcaaagtagcaatcttcctatcgccatcaacaggaattaatgacaacagagattgaagaccgtaaaacaccccagattggtcaaaagcaacaatttgtgccccattctgggtcacattcagacggtaagcccctttaacctgccaatcgccaggaaactctgaagagataatctgggtcgcaactgaataaccactatcctctaatttaatgccttgatcagtaaaacgttttctgacaagaataactgcctcgtcatttaaaccacccaattccagtctcaccccgccagataaatcagcatcctcgggaaaaatctgaacctcttttggtgtcgggataatttgcccacgcaacttctctgatccaacctttttgacctgcaaattcttcatataacgattttcaggcgtcatcaaaatattgttatctgtctgtgtgcgtttccactgatcatcggtgaaagcagataagaattgacttagatcttctgtatccgtactaacaagcactttaggcttcgcatcacccgacgttgcataccagcgaggtagaaaatcagtgctgtaaatctgccagtattctccaataaacggcagttttacctgctcattagctttaataccggtgaatttttcggttggctccagtctatgtaaatcgcccgtaatacgcgtgattttaaactgttcattatccacgctcaggacctgacgaatactgtggaaataaatcgcccagtcaatagagtcaatcgcctgattaccattggttaaagtaatatccactcgattacatttagcccaatctgcccccagtaccgcacagttaacgccgtgatctcctgcctgattatcaacaactttataattaacttttaattgactcagtgcatcaaccacttgctgcgctgtttgggaagcatatgcagaacccataagtccaacagttgcagtcagtgctgctaatgtatgcaatttaaatttcttcattattacctctttcaaacacaaaagttatgtaaggtaagccactgctcataggcactaagagcagcaacaacgagccatgagaagacaatagacggcatgatgacgttgaatttaatcgctttctcgttttggaaaaaaaatgccaatctttacgccatatgtaaccataaaattactgccaaaaatgtaaatagatttacaaaataaaaaacattacattaagaaagaaaattaaaatcatctaatcgacatctataaagattatttttcgcaccacaaattatcaatagtgaaaaaaggattttttgtaaaacatgacagagaacacattaaaaaataacgagatagaagttatacacctcattgatataaaaatagaaataatacaaaaacgaaagattaacactataagaaaatactagaaaacagatcgattaatacaaatactttctaactaaaatagatataaaattatttaccaatgataatatttaaaaaaataaactaccaattgtgatttgtttttctattatagagaatcattaaatgatcaaagtttaactgaataaaaaattcaataattgagatgaaattaatatatatataccaccgggatattgctaataacatctatcccggtgaaaacattatctgtttttaaatacaatctataaaacctacacttacttaaattcaaagctcttcacgaacagcaagacctaagttttgcaacattggggcattctcacatgcaatatagaatacttcattaatagcactactattgacatgttgatgccatgcccatacaggaacatatatcgcatcaccggctttccatgaaatatgttgttcaccaatgagtgaatacccctccccattaacgatatatattatagtttcataactgtgtctgtgtttacgggtcgattgtccaggttgtaaccctcccagagtcatactgagaactttactaggtaaattaaccatagccactttatggcgcctttcatttgagaaattcaaatcttgactcacttcagagttcaatacattttcatgaatcaattgagtaggcttatcttcaattaattctccgggaactttaccaaagtctccagatgagaaaaacgtttttttcactataattacctctaatattgtagttcattgtaaagtttgtattttttaaccatcttgaaataatactcaacatattttatcttagttaccatttcggcctatcttatctaattatcctagcaataccatgtcatatgctggtaatttctgacaaacgcacaaaaagtgccatcaaaattaccgataagtttttttataatattaactgcatcattctacgtaataacagtggtggttgaactatattatcgttctatatccgttatctttcaagttgcctctttgttggctacactcgctcaccccggtcacatcgttatctatacccgtcatctttcaaactgcctctttgttggctgcactcactcaccccggtcacatagttagctatgctcccggggattcactcccttgccgtcgcgatgcatcttgaaatccattgggtatatacactttccacaagcgcgcttttcttaatgtgctaacaccaaaccccaataatatttcgactgctcgctgacttttttatatgcgcaccagatgtattagttaaccattatattattaaccctatttcattagcgttaatatcttcatcccagaaaatcatcccttacttacctaccgacaattttatccaaaattgaacttatgttgtcaggaaccctatcacctctccaagcaatatattggtcaggacgcactaaaaggagcctggtttgatataattgccaagcatcatgaccgggaagatcaataatcttgaccggaattttacgttgatatgcctgagctaataattcagatatatcgggaaaatgagatcctacccgaagcaaactaaacccggagcctaaaatatcgaacagagatactttagtgccagaaataggtgtgagccataagtgcggcaatctccctccgggtacactacttggtttataattaagccaatcatcatccggtacgggatcgctattaataatatgagaagaactatcatatcgggcaccaagttccacaccgatagaagtaaattgacagagaaaatgacttaactcaatattaatcttttcacgcgccagatcacccgcataatccgcatcctctaaatttgcaggcacatatagtgatgctgtctgccgtgtataagaacgtgcagcggcagtatttctccatgcaattggacgacgctcgctttcataagaatccattaacgcattacctgcccagccatttatagacgcaacaattttccaagctaaattgctagcatcgtcgatccctgtatgcataccaaaaccaccggtgggagcaaataagtgaatagaatctcctgctaaatataccctaccctcagaatatttatcagcaacgagagcaacaccgcctttccatatcgtattgccaaggactaatacctcagcatctgaacctattcctgcctgcgctatgcgaacgacttccaaatcatcgataactttcccatccttactctgagtcacaaataaaaaatcatctttaccgtccaggcagataaataacatattttccctaggtgaaataatattgtatatccaggattttttgtctcgtaataatccctggtgaattccaggaacacggatataactggaaaccattccacccgttagaaaacctgccttagcttcaacggttccttcgtaaactataccaagcttagatcgaacaaagctctgtccgccatcacacccaaccatatatgcagcttgccaaacttcatctgcatactttccatcaatatgctccgcataaagttttacttcatctttatactggacaaaatctttaacgcgccagccatatcttattgtaatatttggacgactctttgcatgttgtagtagaaacctttcaacatacatttgatttgcacgtattatgggttctggaacgggatctgtcgaagccgcattttcgcgcatagacattttctccatttccgacggtaacgtaatccgtgcaagctcccatccattaaacttggtaaaatatgatacgtccaaagggaactcttttggcacgcctaatgaccgaataggctgagatatgcctacacgacgaaaatgctccataatacgggcactatgggtactgcctttaggctgccatcgggtctcttcttccaaattaaagataacggaacgaacaccatataaatccaaaaataaagccaacattagaccaacgggtccaccaccaacgatggcaacaggtgatacagaaatattttccgaagtcaaaatatactctccttaataatgattaatagcaataaatatttcagaccaaatatacccgttatctttcaagttgcctctttgttggctgcactctctcaccccggtcacagagttatctatgctcccggggattcgctcccttgccgtcgcgatacatcttgaaatccatagggtatatattaattaaaaaatttatatatctgtgaattatctccttttcctcgctcctcatataaaacaaaatagttataaccatgttctatgtatcattcactaaacaccgtttcatttccctggcagttaagctccacaactctttttcctgagtaattgtgatactttctcacttctttaaggaaacgcttatatatccgttatctttcaagaataaataaaaatgagagctcaaaaaaataacatcaaaaatttcactattttttaatatttaaaataaatcatcatatccaacagaaacgaattcatttatcttatatcacactacactaaacaaggtattctttatcgtttccttaatgtaataaacaatattctgataatatccctctcatactgtcataacaataatatacccgttatctttcaagttgcttctttgttggctgcactccctcaccccggtcacatagttatctatgctcccggggattcgctcccttgccgccgcgatgcatcttgaaatccattgggtataactcttacgtcgtagcttaattctaaaaaagaggtatcctaaattcttagtaaaaataccggtgaactgaaagtgagttggtgggaacacatctttgtgaatgttaaagaaccactccatgcgttcaaactcagagacatcgggagattcagcaagaatcaatctttttataattgcaataaccgtattttcataaaaacctccattcacaatattttaccttcgccataattaactctaattactggatgtatatacccgttatctttcaagttgcctctttgttggctgcactctctcacccccggtcacagagttatctatgctcccggggattcgctcccttgccgtcgcgatccatcttgaaatccatagagcataattaacaatttctaaaatcccatctggaaatttttatttctttcatatttatcgagaatttcaggagaaatatcacttacttaggttttagaactttacctattgccatcgaagaaatttgaccgaaactattcacaacaacgacatattctctaatatagtatttcttctcgaccttttccaatattagttgaataatttattgtccaacaatatttacatctaaatttaactttccattcaatagaatcaataattactaatttcgtttttttatttttgacatcatacgagttcaatccaataattattacattatatatgattacgatcgtttgtattacttattttgccaaaaatatccccaccaacgctttatgctgatatttcatcactagaaactatatcaagtacctttgctgtacatgtcattatgtacacaaagtatctcaatcacactcggataaaagcatcgttacatctgtatttgtcctgatattgctttgatacagttcattaagcatcccaatgcgaaaacgcaccatttcttcaccaaccgcaataacatccccccttcggtaaggtttctcttcaatcattcgatcaataatttttctcatcgcaattgcatgatcttcatcctcttcaacatggattctaaagaaatgtaatgcatcatcaggtgcctttattaattgcaaggcatctaaaattgggccataaactaaaggtacgatcgcctcagcacctaaacacagtgccgcaagccctcttagagaatcatcactgcggcagtggcgaaacatggcatcaatcagttgttgagtactgttaagaatcgggtcacttttaggaacagcgttaatagccgtcatcgcttttttatataactttgcatgagatatctttgctgcatcggttcctgttagctcttccaacagattatgagaaagcagcataaaatctttttgatctgctaaacctcccatcaatgaacacagataacgggtgaaatattgtgaatagtaatggtgctggatcataaactttcttaataaattctggtccgcctctccagaacggcaagcgaccaaaaatatattcgaattaagctcctccaataacactttagagaaaacatcttgccataatggagataaaaaataaccggcctcttctttaagctcgttttgagtattgatagtgagttccataataaacccttttagtaacattcaaccgatgaaatagatgatatacaagctcttctcaagccaaaaatattagttctatgtttatgcaaccctatcaatctcttaacagagattgctgtaaagccgtaggtaagaatatagatattaatgctccaactcagttctactgtgcactgtattcaaagggataaacgcggcaacaagaccagcagtcaggacaagtgaaattttatttacgttcgatcctatgtctattttggttttcatgaccatttcaattttctttcagccttgaatctgtatggctttccgctatatagcagccaaataaagataaattttatttcatactacagattcgctaatagtgaataaatagacctaaaatcacttctgaagtgactttcttgtcaccaatagtgacctaataaaaatcccaagaggcccaaatgaataatttgagtggattcatgatcttcatccatgtcgccgaagctcgtagttttgcaaccgcagcccggcaactcggactctctccttcgtccgttagcaaaagcatatcccgattagaggacaaattaggtgtccgcctgctccaacgtagcacccgtagtgtcagtttgacggcggaaggcacactgttccttgagcgctgtaaacgcatcctggacgagatttccactgcggaacatgaactattaagctctatctctgcccctcaaggccgcctgcgagtaagtttgccattgctcagtaacctgatgttacccgtattatctgcttttgtgacttgttacccacagatagagctggaactggattttagtgatcgattagttgatgttatcgatgaaggcttcgacgccgtggttcgcaccggggaactcaacgattcacgactcatgaataaacgtatagggtctagccgttttatctatgttggcgctccaagttactttgcacaacacggtaaaccatcacaccccagagagttactacaccacgcctgcttgatgcatcgttttcccactaccggccttttagagaaatggccgctatgcttaggaagatccgaaatagacatacatcttcaagcaaagataaccagcaatcatgtcgaaacactgctacacatggcgattcaaggccacggcatagcctgtttgcctgattttaccgttaaacaagcattagctagcggtacattgttaacaatcttggataagtgggcgggtacttcaagcaccttccgtgttctctggccatctaaccgttgggtactacctaaagtcagagcttttgtcgattttatggcagataatttattcccaaaagagaaatgaaaatgcccataaatgacataattaatctctttgactttattctgtaattccgacacctcgtttatccatgactcaatcttctctagtaatgacaaatttagccataaaaaaactgcacctcaatgctggattaagtgtccaacttgtgaggtacagttcattatctcaattaatcctgagaaatttttgcccaagtatcacgcaggccagcggtacggttaaataccagattttctgcactggaatgacaactatcagcacagaaataaccttcacgctcaaactgataagtttgttctgatttagcatcagctaaacttggctcaacaaagccctgacggatcaccagtgattctgggttgattgtcgccagaaaatcatcctccgcacctgggttcggcacgcagaacagacgatcatacagacggaattcagcagcaaccgcatgaaccgcactaacccaatgaataacacctttcactttccgaccatccgctggatctttattcaacgtttgatcatcgtagctgcaatagattgtcgtgatattatcgtcagcatctttctcaacgcgctccgctttaatgatataagcgttacgcagacgaacttctttacccaataccagacgcttatattgacgattcgcctcttcacggaaatctgctcggtcaatatagatctcacgactaaatggcacttcacggctgcccatctccggtttgttcggatgattaggcatactcaaaatctgctccccttctggcatgttttcgatcactaatctgaccggatcaagaacagccattgcgcgaggcgcattttcgttcagatcatcacggatacaagattccaatgctgccatttccacattattatcctgcttggtgacaccaatacgacgacagaattcacgaatagacgcggcagtataaccacgacgacgcaagcctgagatcgttggcatacgtgggtcatcccaaccttcaacaatcttatctgccaccagcagattcagcttacgcttagacataaccgtatattcaaggttcaaacgcgagaattcatattggcgtggacgacaatcaatggtgatattttccagcacccagtcgtacaggcggcggttatcctggaactccagcgtacacagcgaatgtgtaataccttcaagcgcatcagaaatacagtgagtaaaatcgtacattgggtagatgcaccatttgttaccacactgatgatgctctgcaaatttaatccggtacaaaaccggatcacgcatcacaataaaaggggatgccatatcaattttagcgcgcagacaagctttaccttcgtcaaattcaccggcacgcattttttcgaacaacaccaagttttcttcaatagtgcggtcacgatatgggctatttttgcccggctcttttaacgtaccacgatattcacggatctcttctggactcaattgatcaacataagccagacctttgttgatcaattcaatagcatactgatacagcgtatcgaaataattagaagagtagcgaatatcaccgctccactcaaaacctaaccactgaacatcatttttaatagaatcgacgtattcaacatcttccttaactggattggtatcatcaaagcgcagattacactgcccctgatagtcctttgcaacaccgaagttcaaacagatagattttgcatgaccaatatgcagataaccattgggttcaggcgggaaacgagtatgtaccgatgtatgtttaccagttgccaaatcttcgtcaattatctgacgaataaagtttgtcgggcgggcgtctgcctcactcattgttttatacctcaataatgccaaaaacgcgtcacataaccgcctataatccaacaagcagtgccgagaaacaaccatttgttcgtgtaaaatggcgattcagtacaaagttggagcgaaaaaacactcaacagtagcacatgtcaacaatacagctcgctttattataattatccgtgaaaacaaaggaacattgagtaagttatgataatgaaataacccgtaagactggtttttaacccatatttcattcaaccataacaaatattacctaataacaatcatccaattttaaaaaataaataattgatactatatctattaccaatgactatttgataaaattaaaataagtctataatttaaatttccaaattatctattgattgatgtttttactctgtaaatataaacaaataattatatatatcaaatttattattaaaacactatttatgatgttctaaattgaaatttatataaaaaatacaaaataataataagttaattttagaatcaattcgataattcaactattttactaccggattttagcaaaattacactgccattctaataggtatttatttaaaaataaatttacaatcatgctaataaaataaatctattcttgtctgtacatcacgctatatacccaatagatttcaagatgcatcgcggcggcaagggagcgaatccccgggagcatagataacgatgtgaccggggtgagtgagtgcagccaacaaagaggcaacttgaaagatgacgggtataaactctttaatttcaaaagcgtgttttgaagcaacatcttcccgcgattaacttattaagttaattcagttaaaaatttgaacccgtttactatttgaacccatttactacagatgactcaatttatgcaattttaaacaatatcgctacagtgatcacaattactcacttatgtgtagctttttattatttttcaactaaaaataagttgtattgctgttattaatggcgagctatttttcaataaaatttcctacaaataaggtaagcattatgggtatattcaattacttgcagcgattgggaaaagcattaatgcttcccattgccacgcttcccgtagcagcacttttgctacgtttcggccaacccgacgtatttaatattcctttcatcgccagcgctggcggtggtatttttgaaaacctcccgctactatttgcattaggtatcgcaataggcttagcaaaagataatgctggcgctgccgcactggcaggtgtcgtcggttttttagtactcactaaagccacgtcagtcatagactcgactatcaatatgtcttttttcgcaggtattatcgcaggtattgttgccggtcattgttataaccgtttttcaaatacacgtctgccagagtttctcgctttcttcgccggtaagcgattagtccctatcatgaccggcattatttgtctgttcattgcatggatatgtggctatgtatggccatatgtccagcacggtattgatactttcagccttttagtatcaaagagcggcatggccggatggtttacttatggtgtgcttaaccgctctctcattccatttggtttacactatatcctgcattctgttttctggtttagtctgggtgactgtctgaaaattacttatgacttagccagttctgtacataatatctgcctggcaccggatattgtccgttctctgaccatcggcgcagcggttccaggtattgatggctctactattacccaaatagccaccgatatgagccgcggcgacttgaaccgtttcttcgccggtgatccacatgccggaatctatatggcctgggcttatcctatctttatgggcggtttgcccggcgctgcattggcaatgtatcttgcagcaccaaaggaacgtcgtcctcagattggcgggatgctattatccgtcgctttaaccgcatttttaaccggtataactgaaccaatagaattctcattcctattcctggctccagctttatatgttctgcatgccatattggctggtgttagcatggttatcgtcaattcattgggtattctgcatggctttggattctctgccggattaattgaccttgtattgagctggggtctggcaaccaagccgtggttgttaatcccattaatcgccttattctttgtactgtattttgtttgcttcaccctcatgattcgtatttttaacttacgtacaccaggccgcgaaattggagaaacaactcaagcgacttccgcctcccaagacaacgaaacaattcaacattacattaccgctcttggtggtgcacaaaatattcatgccgtagatgcctgcattacccgtctccgtttaaccgttgaagacaacacacaattggatgaacaccggttaaaacaattaggtgcaaaaggcatcctgaaaataggtaagcagagtgttcaagtggtattgggaccccaagcagaaagtattgccgggcagatacgtactcagctatcctcagatagaccagacaaaagatcgtagttaaaaacacctcgaacttaaaagggaactcatctctcgttcccttttatttttcttgcaaaaataagatgactgaatcagtgacaaaaacagtaaaattcatcatttatcctattaattttctggctattttttgtatcttattttaatataaaaaatatctatgaagtacagcatatctctgctcataaaaatgatttaatattcacgcgataaaaagattagttaatcaactaatttatccaactgctataatttcttgttttaagaggcaattatgaggctgatccccctagcgaatgcaagtgacgttggtaaatggtccgcacactatatcgttagcaaaatcaatgcatttaaccccaccgccgagcacccttttattttggggttgccaaccggcagtacaccactggcaacttataaggaattaattgctctgcataaagcagggaaagtcagttttaaatatgtcgtgacattcaatatggacgaatatgtcggtatcaccgaaaatcatccacaaagctatcaccattttatgcaccagaatttccttgatcacattgatattccaaaggaaaatatcaatctgctcaatggtaatgcttctgatgtcgaaacagaatgtcaacgttatgaagacaaaattaaatcttacggtcagattcatctatttatggggggcgtcggtaatgacggtcatattgctttcaatgaacccgcatcatccctgacttcccgtacacgcattaaaacacttaccgtagaaacccgcacggctaactcccgcttcttcgataatgatattaatcaggtgcctaaatacgccctgaccgtaggtgtaggcacgttaatggatgcagaagaaattatgatcctcgcaacgggtctaaataaggcccaagccattcaggcagcaattgaaggcaatgttaaccatatgtggacaataagctgtctgcaaatgcatcctaaatccatcattgtctgtgacgaaccagcaacaatggaattgaaggtaaaaacagtcaaatacttccatcaactggaagcagatattatcggcgaattcgctagcaaaaaataagaatctacgcagcctgatgtctctctcaggctgattaccgccattatcttcaatcatcatctcccgatcccataggaggctaagatgtatgctttaaccaactgcattatatataccggtcacaatagactagatgagcatgccgttatcattgcagacggcttaattaaacgaatttgcctaacacaagagttacccgaacatattgaaaaacgtgatctaaatggtgcaattctttgccccggctttattgatctgcaagtgaatggttgtggtggtgttcagttcaacgatcagttggaaaacatttcagaaaaaacgctggatatcatgcaaagaaccaatgaacgctctggctgcaccagctatttgccgactctgattaccagcacagacgaattgatgatggcctctgttgaggtaatgcgcacttatcttaaacataatcagcatcaggctttaggcttgcatctggaaggaccttatctcaacccagcaaagagaggcactcataatcccgagcttatccgtaagcccacatctgaaatgataaatttcctgtgcaataacgctgatgtcatcactaagttgaccctcgcaccggaaatggttgagcaaaagtatattcagcagttggtagaagccggtattattgtttctgccggtcattcaaatgccagttatgaagaggcccgacaaggattccaaaacggaattactatctcaacccacctttataatgccatgccagctatttcgggacgccaacccggcttgattggcgctatctttgatacacctgaaatctatgctggcatcatcgctgatggtttacacgtttcatggccaaatattcgtaatactaagcgtttgaaaaatgataaattaattctggtaacggatgcgaccatcccagcaggacttgatcccgccatcagtaaaatggcacatttcacctttgcgggtaagaccatatactatcgcaacggattatgtgttgatcaaaacggcgttttaagtggctcctctctcactatgatagatgccgttaaaaatagcgttgaacatgttggtattgcattggatgaagcactgaggatggcaactctttaccctgcccgcgcaattggtgttgataaatatcttggcactgttgaaaccgggaaaatcgctaacctctgtgttttcaatcacgaccttaaaatctgcacgaccatcgttaacggaaaagaaactgaactttgacggactaaatagctgatgagttataacaacacacaaaaacaaattggtaatattgaccttgtaaaacaacttaacggggccgtggtatatcggttgattgatcaacaagggccaatctctcgcattcaaattgctgagcaaagtcaacttgcgccagccagtgtgactaaaattactcgtcagttacttgaacgcggcttgattaaagaagtcgatcaacaagcctctaccggaggccgccgtgccatttccatcgttacagaaaatcgtcacttccatactgttggtgtccgccttggtcgccatgatgctactcttgctctttatgatatgagtggcaaggcattggttgaagaacattatccactgcctgaagcgactcagcaaaaagttgaaaaccaacttatcaacgcaatagaaaattttatccagcaaaatcaacacagaatccgcgaactgatcgccatctcagttatcctgcccggattagttgacccagataccggcatcgtccgttatatgcctcatatcaaagtaaccaattggactctggtcgataacctgaaaaaacatttcaacattagctgttttgttggtcatgatatccgcagcctggcattagctgaacactatttcggtgccacccgtgattgtgaagattcaatactggtacgtatccatcggggtaccggtgccggggtaattatcaatagccagatacttctcaataatagaggaaacttaggtgaaattggtcatattcaaattgatccactcggtgaacgttgtcactgtggcaattttggctgcctggaaactatcgccgctaactcagcgatagaagcgcgagttcagcatcaattaaagcaaggttttccaagccagctaacattaaataattgcaatatcagagctatctgccaagctgctaatcaaaatgatcctctagcatctgaagtcataaaaagtgtcggccattacctcggcaaagctatctctatcgcgattaatttatttaatccacagaaagttgttctggcgggagaaattactgaagctcagaaagtactcttacccgctattcaaagttgtatcaactctcaggtcctgaaagaatttcgtcaagatctgccgatcgttatttctgaattagtccactgttctgctattggcgccttcgctctgactaaacgtgctatgcttaatggtgttctgttacaacacttactcgaaaggtaatgttattttttgttgattttgtcatcaaaatgcttacatgccaaacaaacaagcgactttaaacagatttcgagaaaaaagcagttgacgcatttaactgatatacgcataatgcgccccgcaacgccgatgaaggtaatgcaaaaaagatggctacgtagctcagctggttagagcacagcactcataatgctggggtcacaggttcgattcccgtcgtagccaccatctttgcgggagtggcgaaattggtagacgcaccagatttaggttctggcgccgcaaggtgtgcgagttcaagtctcgcctcccgcaccattcattcatcgagttgtcgttattcagatggggtatcgccaagcggtaaggcaccaggttttgatcctggcatacccaggttcgaatcctggtaccccagccataattctgataacacaattctgacaacatgttgtacagtgaccactttcagttggggtatcgccaagcggtaaggcaccaggttttgatcctggcatacccaggttcgaatcctggtaccccagccactggatatcaatcactggtattttttaatagattttctcacatcaaaaaaggctacgtagctcagctggttagagcacagcactcataatgctggggtcacaggttcgattcccgtcgtagccaccacttattggggtatcgccaagcggtaaggcaccggattctgattccggcattcccaggttcgaatcctggtaccccagccatatttatcaatgtgttacgtgaagtgatatgttgaaaaaatccacagaaagaatagaaaaagaatatacaggtagaatatcttttgatgtagagggccaccgagaggtgtcttttgctttccagccccctatcttttcttgcttgcttgttaattactgcatataaagaaaaacaaattatccacgtcataattaatatagatttacgacgtgcttgtgagcttcactaccaatctatacgttacaatcctaacgcatacttaagcaccgtttttttcattacgccagcccgttgagctgccatcagcgccagattacgagcaactttcagccctggcaattcattactgaacacggtgtaaaatagatccattccagcttgcatcattcggttatccggcattctacgacgctgataacgcatcaatacttccaatgaatcccactgctctgttaattctctcgccttcaccaaaacatcaagcagagtattcacatcccgataaccaagatttacgccttgcccggccagcggattaatggtatgagctgcatcccccaacaatactaatccttcacgcacataactgttagcatgatgacgagtcaaaggaaatgaaccggcggcaacgggagtcactttacctaaccgtataggaaatgcctggaaaatctcctgttcaagttgagccattgacattgcctgtaattgtcgtatgcgtgccggtttgtcgtaccacaccagcgaagcccattgatcaaacagtggaagaaacgctctcgggccagaaggaaaaaactgctgccaagtaatatcctgctggggctgttctgtttttaccgtgatcaacatacaagactgtctgtactgccagccacgactgccaattcctgccatttgccgaacctgagaacgagcaccatcagccccgacaatcaaacgagcagccatctccgttccatcagccagagtcactaaccaacccactttctgccactgcattgcttgcaatactgccgggcatagcaaagtcaaattgggatatttttcaaactgctgccacagagccagttgcaagatacggttttcaaccatatagcccaactcaggcagccctaaactttgagcatcaaacaccaaattagaatcattctgttcccaagtctctaatgtacgatacggcgcactgcgcatctgtaataccgcatcccatgcgccaagttgtttgagcaaatctacagaagcacaactgattgctgatacacgcacatcaggctgactctgtgcatcataagattgtggtggttgatgatccaataaagcaactgtccaaccttcctgtgccaaccccaatgctgttgcagcgccgatcatgccagcaccgaccaccactacatcaaaaatctgttgtgaattattcatatcaaccatgctattaacccattgattagtacagtgtaccgaatttttaattctccggtagagaatatcctgtttaacagtctggtcactgctcctgcaaatgactacaatatccgacaactttatgcctaatacacaattgcttttgccgtgtaataacacttttcagcgcggtagaaagctcggatgcacaagaaaatgtcgacgataaaaaaactgtatattaaaacttggggctgtcagatgaatgaatatgattcatctaaaatggccgacctgctggaaagtactcacggttatcagttaaccgatgtcgccgaagaagcagacattttgctattgaatacctgttcaatccgcgaaaaagcacaggaaaaggttttccatcaattaggccgctggaaaaacctaaaagatactaatccagatctcatcattggagtcggtggctgtgtagcctctcaggaaggcgatttcatccggcaacgcgctcaatgtgtagatatcattttcgggccgcaaacattgcatcgtttacctgaaatgatcaaccaggtgaaaggtacccgcagcccggttgttgatatcagcttcccggaaatcgagaaatttgaccgtctaccggagccgcgtgctgaaggtccatctgcattcgtttctattatggaaggttgcaacaaatactgtactttctgtgtcgtaccttatacccgcggagaagaagttagccgcccatgtgatgatgttctgtttgaaatcgctcaacttgccgctcaaggcgtacgcgaagtcaaccttctcggtcagaatgtgaacgcctatcgtggtgccacttatgatggtgatatctgctctttcgctgagttaattcgtttggtagcggctatagatggtattgatcgtattcgctttacgactagccacccaattgaatttacagacgatattattgccgtttacgaagatacaccggaattggttagcttcctgcatttaccggtgcaaagtggctcggaccgtattctaacgttgatgaaacgcgcacatacagcccttgagtataaaagcattattcgcaaactgcgtaaagcacgtcctgatatcttgataagctctgacttcattatcggattccctggtgaaacccaagatgacttcgagaaaaccatgaaactgatcgctgatgtcaatttcgacatgagctacagcttcatctattctgctcgtccgggaacgccagcagccgatctgcctgatgacgttagtgaagaagagaaaaaacagcgcctttacctgttacaacaacgtatcaaccaacaagctatgagctacagccgtgctatgttgggcagtgtacaacgtattctggttgaaggaacttcccgtaagaatgtgatggaactttctggccgtaccgaaaacaatcgggttgtcaactttgaaggccaacctgatatgattggcaaattcgttgatgttgaaattgttgatgtctacgccaactcactacgcggtaaagttatccgtaccgaagatcaaatggatcttcgtatacacgaatcacctgagtccgttatagcccgtacccgtaaagaagacgaaatcggggtcggcacttatcagccctaaatatagagataatcagtgactcaacaaattcattcacaaatagcaacccaggaaattttcctcgaacccgccgacaatcagcgcctaatgagcctgtgtggtccgtttgatgacaatttgaagcagcttgaacgccggttaggtattgaaattagccgtcgtgataaccgttttaaactgatgggcaaaccgctgtgtgttagcgcagccaccaatatcctacagcatttatatgtggaaacttcccctgtccgtggcgtgatccctgatgtcaagccagaacaaattcatctggcaattaccgagagccgggttctggaacaaaccgccgagagcatacccgaatacggtaaatccgttaatattcgcaccaaacgcggcatggtaaaaccacgcacgcccaatcaggcacagtatattgccaatattcttagccacgatattacgtttgggattggccctgccggcacaggaaaaacttacctggccgttgctgctgcggttgatgcactggaacgacaagagattcgccgtatcctgctaacccgtccggctgtcgaagcaggcgaaaaattgggtttcctaccgggtgacctgagccaaaaagtggatccgtacttgcgcccactctacgacgctttgtttgaaatgctcggttttgaaaaagttgaaaagctgatcgaacgtaacgttattgaagttgccccattagcttatatgcgaggacgaaccctgaacgacgcttttattattctggatgagagccagaatacaaccatcgaacagatgaagatgttcctgactcgtatcggcttcaactccaaagcagttgttaccggtgacgttacgcagattgacctgcctcgtgggcaaaaatccggcctacgccatgccactgaagttctatcaggcgtcggtgagctgagtttcaattttttccacagtgatgatgttgtccgtcacccagtggttgccaaagtcgttattgcctatgaagagtgggaagcaaccgagcaaaaacgcaaacaaacactcagtgaacaacgcaagcaggaagcacaatgagttcagtcatacttgatttacaaattgcctgtgagcattcacaaggtcttcctaaagaaaccctattccagcactggctggatggggttttaccgcaatttcaatctgaaagtgaagtcactatccgtattgttgatgaggcagaaagtcacgatttaaatctgacctaccgtggtaaaaataagccaacaaatgtgttatctttcccatttgaggcaccaccagagattgatttacccctgcttggcgatttaattatctgtcgtcaggtcgttgaaaaagaagcggaggaacaacaaaaaacaatagaagaacattgggcgcatatggtggtccacggatgcctacatctgctgggctatgatcatatcgaagatgatgaagctgaagaaatggaatctttggaaacagaaattatgcaaaagttaggttatgctgacccctatcttgcagaaaaagagtaaccattcgtaccatttttatgctaaaaaataccaacaataacttatttaatgggaaattttcattaaaacgccatgagcgacgaccatccttcaagtaatgacaaccctagccctaagaaagggtttttcactcttcttcttaaccaactttttcacggtgagccaaaaagccgtgatgaactggtggaactgatccgtgactctgaacaaaacgatctgattgatcctgatacccgcgatatgctcgaaggggtaatggatatttccgatcagcgtgttcgggatatcatgatcccccgttctcaaatcgttaccttaaaacgtaatcaaaccctggacgaatgtctggatgtgattatcgattcggctcactctcgtttccctgtgatcagtgaagataaagatcatattgaagggattttaatggcaaaagacctattgccatttatgcgcaccgattccccaccattcagcatagataaggttctgcgtcaggctgtcgttgtacctgaaagtaaacgggttgaccgcatgctgaaagaattccgttctcaacgttatcatatggcaattgtcattgatgagtttggtggtgtatcgggcctagtcactatcgaagatattcttgaattgatcgtcggtgaaattgaagacgaatacgatgaagaagaagatgtcgatattcgtgccttgagccgtcatacctatacggtacgagcactgactcagattgaagactttaatgaagcctttagcacccaattcagtgatgaagaagtggatactattggtggtctggttatgcaggcattcggtcatttacccgccagaggagagtccgttgatatcaacggctatctctttaaagttgctatggccgacagccgaagaattattcaagtttatgttacgataccggacgatgcgccaatacctaaccttgaagaagaataaaatctgaatgaacaaagcttcattattaaattgccagcggctacgcgccttactggcactgttttttggagccagtggaacactggctttttcaccttttgacttctggcctgccgcgattatctccctgtttggactacaacttctgactttaaacagaacaccccgacaagcggcatttattgctttttgttggggattcggtctgttcggcagtggtacaaactgggtgtatgtcagtattgctaatttcggtggcatgccaaccacagtcaatattctgctggtcatattacttgccgcctatctctcgctctatcctgctttattcgctgccttactcaatcgtttcttcgcaaaaacgaacgggttgaggctggctgtagcagcacctgcattatggcaactcaccgaattcctgcgaggctggattctaaccggtttcccctggctacaattcggctacagtcaattagatggtccaatgaaagccattgcaccaattttgggtgttgaggccatcactttcctgttaatggctctcagcgggttattcgttctggccgtcatacatcggaaaatagtcgctggtattatcgctgtcgccattctgctattaccatggccaatacgccattatcagtggtacagcctgctatctgaaaaaactgttgatgtcgcgctgattcagggaaatattccacaatccctgaaatgggaccctaaaatgctcagcgaaactatggacatctacatgggcaacagcctgccatacatcggcaaaatgccgataatcatctggccggagtctgctattccttcattggaaagttatcaacgccactttctaacaaaattggatgaactgttacgcaatcaacataccagcctcattaccggtattgtcgatgaaagagccgttggcgaccgtgataagatctataacagtgtgattgtcctcggcgataaaataccttatcaatatccggcagctattcgctacgataaatatcatctggtaccattcggtgaatttgttccgctagaatccctactccggcctctggcaccattcttcaacttacccatgtcttcattcagccgtggcaactacattcaaccacagctttctgttgcaggatataacctaaccaccgctatttgttatgaaattatactgggtgaacaagttcgggcgaatttcaaaccggataccgaattcttactcactgtttccaatgatgcttggtttggtggttcaattggcccttggcaacatttccaaatggcgcgcatgcgttcccttgaattaggacgcccgttactacgtggtaccaataacggcattacagctgttatccgcccggacggagaagtgcaagcagcactcccacaatttacccgtaatgtcttggtagctaaagtgacacctgcaaccgggataacgccctatgcacgctggggtaactggccgttatggataattaccgtatcattttctctgtttgccttaacgtataaccgccgtaaatcttaattcaaatatccatcttgattcgaatgtctagacagtcaaaagggagcaaaactgctcccttgaaattgtcgatttaacattattaatcggccttatcaacctatagaatcgtctagcaattggcatgaaatataccttgcccaattcagccattgacccatgctaaccctcaatcactgatatcactctatgtatacaagtaacctacttaaacaacttattggtattaattttacccttcgttattattttggcatgctaattgctactatctctatgaatgaaaaggaaaatagctgtttcactaataaaaaatgggaacatgcaccaaaaaaatgataatcacgtatctttattatgcaagacaaacaatattgttcatttatagtgcgagacagctcccgaaatagaaacaattcattttcattatctaacccttttgtactattttttaacactatatacacatacaacagcaaatgatcctagattaaaaacaaatcacagagagacttttgcaaacacaacatcgcaaacgatagccacattaaaggagttatatatgcgtatgcgtaatctagtattaaccatgatgttacttggcatggcgggggctgctcaagccgaagaattaacgggaacactgaaaaaggttaaagatgatggtgtgatcattgtgggacatcgtgaatcctccgtaccttttgcttactacgataaccatcaaaaagtcgtcggctactctcaggattattctaatctgattgttgaagcagtgaagaagaaactggacatgccaaatctgcaagtaaaattgatacccgtgacttcgcaaaatcgtatcccattgctacaaaatggcacttatgatttcgaatgcggttccacttccaataaccttgaacgtcagaaacaagtcactttctctaacagcatctttattattacaacacgtttgctgactaaaaaaggttccggtataaaagatttcccagatttggcgggtaaaaatgtcgttgtctcagcaggtacgacttctgaaatcttgctgaataaactcaacgatgagaaaagcatgaaaatgcgcatcatcagtgcaaaagatcatggtgactcattccgtactctggaatctggccgggcaatcgcctttatggtggatgatgcactactagcaggtgaacgcgccaaagcgaaaaaacctgatcaatgggaaattgttggtacacctcagtctagagaagcctatggttgtatatcgcgcaaagacgatcttcaattcaagaagctgatcgatgagaccattgttcaggcgcaaacctctggagtggcagagaaatcatttgagcgctggttcaaacacccgattccacccaagaacctgaatttgaatttctctttgtctgatgaaatgaaagcactatttaaatcgccaaatgataaggcgcttgactagaaatataattaaaaaaatgactatttgattggcatcacagggtgcgaggtggtcgttccctacctcgctttttttctcagccaatcaatcgttttcaggggatcaagctacaccctaacagggagtattattatgtcaatcgattggaattggggcatctttttgcaagctgcccctttcggcaatacgacttatctaggctggttgatagctggatttcaggtgacgattgccttgtctatctgcgcctggattatcgctttcattgtcggctcactgttcggcatcttacgcactgttcccaataaaatattatctgggataggtacctgttatgttgagctctttcgtaacgtaccactgatagttcaattttttatctggtatctggttgtacctgaactactaccagaaaaaatcggtctgtggtttaaaactgagctggaccctaatatccaattttttctctcatccactgcctgtttaggtcttttcactgctgctcggatgtgtgagcaggttcgtgccgccatacaatcactaccacgtggtcaaaaagcggcagggctggcaatggggctaaccttgccgcaaacctatcgctatgtcctattacccaatgcctatcgagtaatcattccacccatgacatcagaaatgatgaatctggtgaaaaactccgccattgcctccactattggtctggtagatatggcagcacaagcaggtaagttacttgattactcagcacatgcttatgaaacatttacggcgattacgctagcttatatcggaatcaatctggtgattatgcttgccatgcacttgcttgagaaaaaagtgcgtttaccgggtaatattggaggtcaataaatgtacgagtttgactggagttcgattatccccagtatcccgtttctgctacaaggcttagtcattacagcaaaaatcacgattattgctgttgttgtcggtattctctggggaaccgtactggctgttatgcgcctctcttcggtaaaagcactgagctggtttgccactttatatgtcaatctgttccgttctgtaccactggttatggtactgttatggttctatctgattgtgcctagcctagtgcagaacgttctagggatttctccgaaaacagatattcgtttaatttcagctatggttgcatttgcctttttcgaagctgcttattattcagaaattatccgggcaggaattcagagtatttcccgcgggcaatcttcggcagcactggcattgggtatgacaccaatgcaaagtatgagactggttatcctgcctcaggcattccgtgcgatgaccccgctgttactgacacagggtatcgtactgtttcaagacacctcattggtgtatgtgctcagcctagcggactttttccgtactgcggcaaatatcggtgagcgtgatggcactcaggtcgaaatgatcctatttgctggtttggtttattttattattagtattgccgcatctatgctggttaactatttgaagaaaaggactgtttgatgatctccctgaaaaatgtatccaagtggtatggccaatttcaggttctctccgactgctcaactgaagttaaaaaaggtgaagtcgttgtggtctgtggcccgtctggctcaggcaaatccaccctgataaaaacggtcaatggcctggaatccatccaacagggtgaaattctggttaatgacattaaagttaatgataaaaacaccaatctggcacaactacgctctaaagtcggcatggtgttccagcattttgagctgttcccccatctatccatcattgaaaatttaactctagcgcagattaaagtgcttaatcgtgataaaaaagcagcggaagaaaaggggctgaaattacttgaacgcgttgggcttgccagtcaagcgaataaattcccgtctcaactttccggtggtcaacaacaacgtgtagcaatcgcccgagccctttgtatggacccgattgccatgctatttgacgaacctacctccgcactcgaccctgaaatgatcaatgaagtgctcgatgtcatggttaaactggcagatgaagggatgaccatgatggttgttactcacgaaatgggctttgcccgtaaagtagccaaccgggttatctttatggatgaaggcagaattgttgaagatagcaaaaaagaagatttctttgcgaatccaaaatcagatcgcgccaaagaatttctagctaaaattcttcactaacctcatttcatccccggtggtgactcccgtcgccatcggattttccctcagaacctctgtttcttatataccaaatcagatatgctatgccgatctcatattttaccaactaaatgattgctacaaacgtagctttttactcaccataggatcatcggtgccatgcaagaacaataccgtccagaagatatagagccgcaagttcagcttcactggcaagagaagcaaactttcaaagtgacagaagacaacagcaaagaaaaatattactgcctgtccatgctaccttacccttctggtcgactacacatgggccatgtacgtaactacactattggcgatgttatctcccgttatcaacgtatgcttggaaaaaatgtcctgcaacctatcggttgggatgcatttggcctgcccgcagaaggtgccgcagtaaaaaacaatactgcacctgctccgtggacctacgccaacatcgaatatatgaaaggtcaattgaaaacactgggcttcggttacgactgggatcgtgaagtcacaacctgtaccccggaatattaccattgggaacagtggtttttcaccaaattgtatgaaaagggcttggtttataaaaaaacctcctcagttaactggtgtccccacgatctgactgttctggctaatgaacaagtggtcgatggctgctgctggcgttgtgatagcaaagttgaacgtaaagaaattccacaatggtttatcaaaatcactgattatgccgaagagttgttaagcgatctggagacgctggaagagtggccggagcaggtcaaaaccatgcagcgcaattggattggccgttctgaaggggtagaaatcacttttgatgtggctgatagtcaggagaaactgaccgtctataccactcgtcctgatacgttcctcggcgccacttatgttgcgattgccgccggtcatcctctggcaaaacaagcagcagaaaataaccctgaactggttgctttcattgatgagtgccgtaataccaaagttgcagaagcagatatggcaacaatggagaaaaaaggcatggcaaccggtatgtttgctattcattcattgaccaaagagaaagtggcaatctgggttgcaaacttcgtcctgatggaatacggcaccggtgcagtcatggcagtgcctggccacgatcaacgcgactgggaatttgcgacaaaatataacctgccaataaaagccgttattctggacaatgaaggtaatgaaccgaacgtccatgaagcaccggtaacagataagaatatcctgtttaattccggtgaatttagcggtctgaatcacgaagccggttttaatgccatcgctaataaactggtggaaatgggcgtaggtaagcgtaaagtcaactatcgtctgcgcgactggggtgtttcccgtcaacgctactggggtgctcctattccaatggcaacactggaaaatggcacagttgttccggttccagcagatcaactgcctgttattctgccagaagatgtcaaaatggatggcatcaccagcccaattaaagctgatcctgagtgggcaaaaaccactatcaacggccagcccgcactacgtgagaccgataccttcgatacctttatggaatcttcctggtactacgctcgctacacctgcccagattatgacaagggcctgctcgatccagcagcggctaactattggctgccagttgaccaatacatcggtggtatcgaacatgccatcatgcatctgatgtatttccgtttcttccacaaactgatgcgtgacgcaagcttggtcaattccaatgaacctgccaaacgtctgttatgtcagggcatggttctagccgatgctttttattatatcggcaaaaatggtgaaaaaatttgggtttccccggctgatactatcgttgaacgtgatgataaaggccgtatcgttaaagcgacggataaagaaggccatgagctggtttataccggcatgagcaaaatgtctaaatccaaaaacaacggtattgacccacaattgatggtagaaaaatatggtgctgataccgttcgcctgtttatgatgttcgcggcaccaccagagctgacgctagaatggcaagaatccagcgttgaaggagcaaatcgctttttgaaacgtgtgtggcgcttggtttatgaacatagcagtaaaggggcaactcaaccactggatatcacaaacctgacagtggaacaaaaagatctattccgtgacctgcacaaaaccatcgctaaagttacagatgatgttggtcgccgtcaggcattcaatactgctatcgctgcggtaatggaattgatgaataaactgacccgcgcaccacaggaaactgagcaagatcgcgctctgatgcaagaggcactgttggcggttgtccgtatgttgtcaccaataactcctcatgcttgctttattatgtggcaagctctgggtggtgaaggtggtattgatacggctgattggccacaagctaatgagcaggcaatggttgacgataccaagctagtcgtcattcaagttaacggtaaagtgcgtggtcgtgttactgtgccagccgatgcgactaaagaatatgttcatgatctggcagcacaagagtatggtgtggcgaaataccttgaaggcgtcactattcgcaaagtcatttatgtaccaggcaaactgctgaatctggtcgtcggctgataaaggaggcaatgtgcgacatcgtattttaacgttgttgctggggttggcggtgctagtcaccgctggctgcggttttcatctgcgcggcaccacccaggtgccagcagaactcaaaaagctgcaaataacaagcagtgacccatatgggccactggcccgttccgttcgccaacagcttcgtctgaataacgtcactatccttgaggatggtagcgctgatgttcctgttttgaagttaattgactcttctgaaaataaagatactgtctctgttttccaagatggtaaggcagctgaacgccaattgacactgaatgtcaatgctcaagttattatgccagacggtagcgtatatccgctgcgatccagggttgaccgctcttttttcgacaacccattagaggccctggcgaaagatgctgaaaacgagataatcaatcaagaaatgcgtgaacaagctgctcgccggttagttcgccagttattgaccgttcacaacgcagaaaagcagaaagccagagagaaacaggtgggacagcaagctgcgcaagcacaatgatcaaactctatcccgaacaactgatttcgcagctcaatgaggggctgcgaaactgttatctgatatggggtaatgaacccctactattacaggaaagccaggatcatattcgcaaggctgctgaaaaaaacgccttcactgaacacttcacctatacgctggataatcacaccgagtgggatgagatattcaatatttgtcagtcattaagtctgtttgctagccgtcaaacactcactttattactgccggaaaatggccctaacacaaccatagccgaacaactggtgaaactggcagaactacttcacccagatatactgctaatactacgtggtttgaaattgaccaaggctcaggagaacagtcactggttcaaaatactaggaaaaaatggtgtttatgtcagttgtcagaccccggaacagaaccgtctgccgcagtgggttgcacaacgggccaaagctatgaaattggtgctggaagaacaagccaatcaactactgtgttattgttatgaaggaaatttactggcgttagctcaggcacttgagcgtctttccctgctatacccagacggtaaactaaccttacatcgtgtcgaaaatgcggtaaatgacgcagctcactttacaccttatcactgggtagactcgctattatcaggtaaagcaaaacgagcctggcatattctaaaacagttaaaacaggaagattgcgaagctgttattctattacgtaccgtacagcgtgaattactgttgctactcacgctgaaacgtcaaagtaccacaaccccgatgaaaacactgttagatcagcatcgggtatggcaaaaccgccgttcattactgacaagcgcactgcaacgtctcactcaacatgatttgcagagagcaattcatttacttgtacagatggaacgccagatcaaacaggattacggccagtctatttggtcagatttagaaactctttccatgctgttatgtggaaaaaccttacctgagagcttttttaatgcctcatgccattgattctacttgcccgaaacaacccgttattaaagcattatttggtggaacattcgatcccatccattacgggcacttgcagccagttgaaaccctggcatatcaaactggcctgaatcaagtgattttactaccaaatcacgtcccaccacaccgcccacaaccggaagccactgcacaacagcggcttgaaatggtacaactggcagtacaggatagcccactgtttaccgtcgataagcgtgaactggagcgtactatcccctcttacacaattgatacgctagagtcattccgtcaggaacttggtaacaaacaaccactagcatttataatcggccaggatgctttgttatcactgcacacttggcatcgttggcaagagctactgagtttctgccatttgctagtttgtgctcgtcctggttatcaaactcagttttccacaactgaaatgcaacaatggcttacaaaacatcaaatctacgatccaagccaacttggcagtaaacctaacggttatatctatctggcagatacacctctgctgtcgatctcagcaaccgacatccgtcaacgccaccagcaagggttaagttgtgacgatttactccccctttcagtacaaaagtatatagattcacaggggttatatcgccaatagcggaatctgcctcgattagtcgcttagttgacttacccttaagtgacctgacatgctattattccgcactatttaatcaattgtgataaaaaataaggatgagccttttgcaaggtaaagaactccaacagtttgttattgataagcttgaaaactccaaagcacaggatattgtttcccttgatgtccaagggaaatcaagtattaccgattgcatgatcgtctgtaccggaacttccagccgccatctgatgtctgtcgcagataatctggttgatgactgtcgtgcgagcggcctgatcccactcggcgttgaaggacaaggcgtatctgactggattgtcgtagacctcggtgaagttatcgtacatgtcatgcaagaagagagccgccgcatgtacgaactcgaaaagctctggagctgagtttgaagctgcaattaatcgctgtaggtacaaaaatgccggactggatacaggccggctttacagattatttgcgtcgttttcccaaagacatgccatttgatctgatagaaattccggccggcaaacggggcaaaaatgcggatattaaacgcattctggaaaaagaaggcgaacaaatgctggccgctgtcagcaaaggcagccgtattgtcaccctggacattccgggttcccgttgggaaacgcctcaattggcgcaacagcttgaacattggaaacgggatggtagagatgtcagtttgttgataggtggacccgaaggtctcgctccggcatgtaaagctgccgcagagcaaagctggtcactgtcaccgctgaccttaccccatcctctggtccgagttttagttgcggaaagcctgtaccgggcatggagtattacgaccaatcatccctatcatcgggaataatttggttatcaacggataaaagcgaatttctggcaatgggatgaagaataaacgtaccccttttcgtgattatacggctgaatcagccctatttgctcgccgcgcattggtggcgtttattatcatcttggtactgacgggtatcctgatggccaatctttaccatttacaaatcacccgccacgaagactatcaaacccgttcaaacgaaaaccgtattaaactggttccaattgcaccaagtcgcggtatcatttatgaccgaaacggcacgccattggcacttaatcgaactatctatcagttggaaattatacctgaaaaggtagaacaccttgagcaaacgctgaatgatttacgcaatgttatcgatctgactgacgaagatattgccaactttgaaaaagagcgtaaacgctcgcgccgctttacctctattccattgaaaacttcacttgatcatattcaagtagcacgctttgccgttaaccaatatcgtttccctggttttgaaataaaaggttaccaacgccgcttctacccttatggttcagcactgacacatatcatcggctatgttgctaaaattaatgataaagatgtagaacgattggataaagaaggtattttacctaattacgccgctacccatgatatcggcaaactgggtattgaacgctattatgaaactgttttacacggcaaaacgggttatgaagaagtcgaagtgaataaccgaggccgggtgatacgccaattacatgaacaaccaccacaggccggacaggatatttacctaactatcgatctcgaattgcagatttacattgagaaactcctgacaaccagccgtgctgcggtcgttgtcagtgatccacgtaatggggaaattctggcgctggtatctaacccaagctatgatccaaacctattcgtaaacggtatctccaataagaactaccaagagctattaaacaatcctgataggccacttattaatcgtgctactcaaggaatctatcctccagcttcgacagtgaaaccttttattaccgtcgcagcactaagtacaggcgttatcaataaaaataccaccatttttgatccgggttggtggcaattaccgggttcagaaaaacgctaccgtgactggaaacgttgggggcacggtagtctcaatgcacatagagccattgtagaatccgcggatactttcttctatcaagtggcctatgatatgggaattgatcgtctatctgagtggatgaccaagtttggctatggcgaatatactggaatcgacctagccgaagaacgcaccggtatcatgcctacccgcgaatggaaacaaagaaaatataaaaaaccttggtatcaaggagataccattcctgtgggtatcggccagggatattggacagcaacccccattcaaatggtaaaagcactgacaaccttaattaacgacggtaatgtaaaaacaccacatcttctgctaagcaagaagctgaaaggtgagatgatcccttatcaacaaacagaaaatattcagatcggtgatatccattcaggatattgggaattagccaaaagtggcatgtacggtgttgctaacctaccaaacggtaccggccacaagagctttatcagcacgccttataaagccgcggtcaaatcgggaacagcacaggtctacagttatgaaacctacaatgccagtaaaattgctgagcatttacgggatcataagctgatgaccgctttcgccccttatgaaaatccgacagtagccctttccattattttagagaatggtggtgcaggtccagcagtgggaacccttgttcgccaaatcctcgaccatgtactattaggggataacaacataacattgccgaatgctgtccctacacctcccggaacagaaagtgactgattaacaccatgacagaaaaccaaaaaagggttcctctctggaccagattacatatcgacctaccgttactcctgtgcattttggcattgctgatatacagcgcttttgttatgtggagtgccagcggccaagatatggggatgatggagcgcaaaattggtcaaattggtgcaggactggttgtcatgctcatcatggcgcaaattccaccaagagtttatgaaagctgggcaccccatctctatattgtttgtgttattttactgatttttgtcgatgctttcgggcaaataagtaaaggtgcccaacgctggctggatttagggatcatccgcttccaaccttcagagattgccaagatagccgtacccctgatgatcgcacgctttatgaaccgcgacttatgccccccatcactgaaaaataccactatcgctctgatgctcatttgtctgcctactttactggttgccgctcagccagacttagggacttcaattctgatcgcggcttctggtctgtttgtcctgttcctttcgggcatgagttggcggttgatcggtatcgcagctctactgttagcctgttttatccccatcttgtggttcttcttgatgcatggctatcagcgcgatcgcgtcatgatgctacttgatccagaaagcgatccactaggtaagggttaccatattattcaatcaaaaatcgcgattggctccggtggtttatcaggtaaaggctggctattaggaacacaatctcaattggagtttctgccagaacgtcatacagatttcatatttgccgtactatcggaagaacttggtttgattggcgtactactgttattaacattatatatgttattaattacgcgtgggttggttatcgcaaccagagcacagaacacttttggtcgggttatggttggcggcctaatgttaattctatttgtttatatcttcgtcaatattggcatggtgagtggtatcctgcctgtagtcggcgttcctttgccatttgtcagttatggcggctctgcgttaatcgtcttaatggcgggtttcggcattatcatgtcgattcacacacacagaaaattgttgtccaaaagtttatagagaagaggtttcaatgcgtcaacactggcttatactcagcatgattgcagccctgctatctggctgtactactcctgacaaacaaaaatctgccccgttacccgcagtaccaacgcaggatgttctgggtgcagaacctcgttatgagccttatcatcctagcgccaatgatgattatcagatgaacggacatacttatcacattgtgcaagccccctctcagtttagtgagacaggttatgctagttggtacggtgaagaatccagcggcaaaatgaccgcaattggtgaacgttttaatccttatgcgctgacagccgcccatcctaccctgccaattccaagttatgtccgtgtgaccaacttgagcaatggccgcatgatgattgtcagagtcaatgaccgtggtccttataaaccagggcgaattatcgatctatcgaaggcttccgctgaacggttaaacctgactcaaagtaccaaagttaaggttgattttatcgaggttgcccaggacggttctgcatccggtcccggtaccattggcagccagatagttaaacagagttatgctctaccgggtagaccaacgctgacaaccagtccattaggaacaccaacaatggagaatatccctgatcagactagcagccagcccttaacaaatcagccgatgaaactgacgatacaaccggaagcgactgaacaactccccgcaatgaagctgcaaccacctaagtctgttacaaacagtacttcaatagtcacaacaccaacagccgcctcagcaaatggttttatggttcaggttggtgctgttagcagtgagcaacgcgcaaaagagtggcaacaaacactagcgcaacgctttaatgttcaaggtcgcgtaactcaatatagtaacgtttatcgtgtacagttagggccattcaacaatcgccagcaagctgccgatttacaacaaaaactggctgaccagatacagcaatcttcttttatcgtcagtccctgatcgttctcttactgatatttcactttgattcagatatcagtaagaggagtaaaaaaaatgtaaacctgagtcttgtcaaaatttggcaatgtcactatttttttcatttgctatgatgtggctcgatatcaaccttttctcacggatgttgtcaaactaaccatgaaatatacaaccacttctcgttttataaaaagcgccaccttgggtattgcgctggcaataagtgcttctgcctttgccaatgggaatgatgccaacctgaaaacgatgatcccaggtgtgcctcagattgatgcggaagcttatatccttatcgactataactcaggtaaagtgctggctgagatgaatgcagatgcacaccgtgatcctgccagtctgacaaaaatgatgaccagttatgttattggtcaagcaatcaaatcaggcaaaatccacccaagtgatatggtcactgttggcactgacgcatgggcaaccggtaatccggtatttaaaggctcttccctgatgtttctcaagccaggcgatcaggtctcggtttctatgttatcccgcggtataaacttgcaatccggtaacgatgcctgtgttgcaatggcagattatgttgccggtagccaagagtctttcgttaatttaatgaatggttatgtgaaatcgcttggattaaagaatacgaatttcaaaaccgttcatggcttggatgcagaaggccaatacagctctgcccgtgacatggcattgattggtcaagcgctgatccgtgatgttcctgaagagtacaccatctataaagagaaagagtttacctacaacaatatccgccagacaaaccgtaatggcttattgtgggataagagcctgaatgtcgatggtattaaaaccggccacactagcgcagcgggctataacctagtcgcttctgcaacggaaggcgatatgcgcctgatttctgcggtattaggcggccacacttataaaggccgtgaaacagaaagtaagaaactgctgacctggggtttccgtttctttgaaactgttgctcctctgaaagcaagcaaagaattcgcttctgaaccagtctggtttggagataacgatagggttcagttaggtgttgataaagatgtttatctaactattccccgtggtcgtctgaaagatctgaaagccagctatgtcatgaataatagtgaattacatgcaccactggcgaaaaatcaagtcgtaggtactatcaactttcaacttgatggcaagactattgaacagcagcctttagtcgtgatgaatgaaataaaagaaggcagcatcttcggccgctttatcgattacatcaaactactatttcatcattggtttggctaattcttgagacaattaagcgataaaatcgggttactacccgatcgcaataagcatctccgtgtttttaaggcggaggaaagtatcaaattttacagaagaaactgaccgtacgtatcgcggaaagcaaaacaggagcgcccatgaaaaccaaattaaatgaactgcttgagttcccttgttcattcacttacaaagtgatgggcttagcggagcctgagctagtcaatcaggtcgttgaagtggttcaacgtcatgcgccgggcgattactctccacaagtgaagccaagcagcaaaggtaactaccactcagtgtccattactatcaatgcgactcatattgaacaagtagaaacgctatatgaagagttaggtaaccttgaattggtacgggtagtcttgtaatacacacaagagaaatcccctataattttacaggggattctttatctatcaggaatactacagtttcagatgcactaaactggtgagaagctcttctgagggttatactgaccaaatcttatagctatcaaatgaagtttcaattgcaacataaaacgattttcttacgtcaattaggaatacagccctacgagccgatttctgatgcaatgcacttgtttactgagcagcgagatactaatacacctgatgaaatctggctggtacagcatccaaaagtctttactcaaggacaagcaggtaaagctgagcatttgctgtccctcggtgatattccggttattcaatccgatcgtggtggacaagtcacctatcatggccctggtcagcaggttatgtacgtcatgattgacattaaacgcgccagaattggtgtacggcaactggttacggcgatagaggatactgtcattaaaacccttgctcactttggtgtgaaagcctatgcccgcccggacgcccctggtgtctacgtcaatgaagcaaaaatttgctctcttggattacggatacgtaaaggttgttctttccacgggttagccctcaatatcgcaatggatttagaacccttccagcgtattaacccttgtggctatgccggcatgaaaatgattcaactcagtgacttagttcctggaattactgttgaacaagtacaacctgttttggtagagaaattttgccagcagctaggatttaaactgaacagttaaagatgctataattttttaacatttttcaaaaattttttaattgtttatcatacagtagactgaatgataaatctcaacctgatgaatttaacactggaaccagcacgattatgagtaaaccaattcagatggaacgcggagttaagtaccgcgacgcagacaaaatggcgctgatccctgtcaaaacagtgatgaccgaacgtacagaaatcttgcgtaaacctgagtggatgaaaatcaaacttcctgcggattccagccgcattcagggcatcaaatctgccatgcgcaaaaatggcctgcattccgtttgtgaagaagcatcttgccctaacctggcagaatgcttcaatcacggtacagcaacctttatgatccttggcgcaatttgcacccgccgttgccctttctgtgatgttgcgcacggccgcccaatggcacctgacaccaacgaaccggtaaaactggcacaaaccattaaagatatggcactgcgctacgttgtcatcacctccgttgaccgtgatgatctacgtgacggtggtgctcagcactttgctgactgcatctctgctattcgtgaaaaaaatccatccattaagattgaaaccttagttcctgacttccgtggacgtatggatcgtgcacttgaaatactgacagcgacaccgcccgatgtctttaaccataacctggaaaacgtaccccgggtttaccgtcaggtgcgccctggtgcaaactatgagtggtcactaaaattacttgaaaagtttaaagaagcccatcctgatattccaaccaaatcgggtctaatggtcggtcttggtgaaaccaacgaagaaattcttgatgttatgcgtgatctgcgccgccacggtgtgactatgctgactctgggacaatacctacaacctagtcgtcatcatttaccggtacagcgctacgtcagcccacaggaatttgatgaaatgaaagaagaagcgttagctatggggttcacccatgctgcctgtggtccatttgtccgttcttcttatcatgctgacttgcaagccaaaggtgaagaggtcaaataacccagtttcttataccctatgggtttcaagctgcatcgcgacggcaagggagtgaatccccgggagcatagcaaactatgtgaccggggtaagcgagtgcagccaacaaagaggcagcttgaaagatgacgggtatattatgattaatattattctggctatatttatcggaggtggcttaggcagcgtattacgctggtttatcagcctccgtcttaataatatttcttctaatatcgcaattggcacccttaccgttaactgtattggtgcattaattatcgggctaggattagcctattttaataaatctacccatcttgatccggcttggaaattgatgttgaccaccggtttttgcggaggtttaacaaccttttccacattctctgttgaagttgtttatttgttactggacgggaaactaggatgggcactgggaacagttttgcttaatctttttggatcattactgatgaccatgttagctttcgtattgatgcatgaactttaaattaaaattacttacatatcatacaagacaaaaaaaacccgttgaaataacgggttttcgaaatacggagttaaaatcagatagcgacaacgtttacagcagatggacctttagcgccgtcagtgatttcaaactctactttttgaccttctgccaaagttttaaatccggtaatctgaatagcagagaaatgcacgaatacgtctttgctaccatcttctggagtgataaacccgaatcctttagattcattaaaccacttaacgttacctttaatttttgacatcaaacttacctttaacgtgaaaattaagacacaaaatctgcgtcgcatacagtacaacaaataagttggctcactgtctacaaccaagatcacgaaaagcataataaaatacgatagatgttatctttatttagttttactactaaataatacacatatataaatatctataaccttccctggtcttttatcacacaagttatctaacaaacaaatgactaggttttttcatgttctaatagccagcttttaatattcaggccgccggtatatcccaccaatttaccatcatgtccaataacacgatgacaaggcacaattaatgagatcggattacgagaattagccattcctaccgcacgacaataattaactgaacctaatgctaatgaaagttgcttataactccacacttctccaaatgggatcttacataactgtaaccatacacgctgctggaattcagttcctgccgggttgagtggaacagaaaactcagtacgcttacccgcaaaatatccccgtaactctttcacgcactgcttagtaatatcatttttcacttcaggcgctgttttttcatcaacaaaatatagactggtcactcccttatcatccgcagtgatatgaatatacggtttaggaaatcctttgggtgtatcaaaatagtgatgatacataaccacctccattgaaaaaaatatcaatcattatagggattagagtaaatcgtcttttcgacaaattgcaatgatgaattcagttgctcccttaccaccgactagaaaacttaaacttgtctgaaggcgaaaagtctaccaacaaacagggaataaccaacattgtaattttaatgatagtcactcgatgtaaaataaacaccatatatagtgcggttgaaataaaatttcactacatatagtataattcaagttctggcctccaggtaaattatcactcatgaaccaaattttgccattacatgcccacaaactgacaaaggagtcgttaatgagcattaccatttatagcaaaccggactgcgtacaatgcagcgcaacctatcaggtgctaagccgaagaaatattccttatcagattatcgatttaaccgaaaacccgcaggctttagcgactatccgtgctatgggctatcagcaaattcctgtggttgttgcaggtacacagcattggtcaggatttcgtccagataaaatcaacgcattaatcgagaatgtataggtttattatgaatataaatccgctgatctatttctccagttcatcgagtaatagtcatagatttgttcagaaactggagataccagcctttcgtattccaataaatcaatcagacagcccattaaatataacttctccttacattttactgacccccagttacggtggcggcagtactaaaggcgctgttccaccacaagtgatccgatttctcaatatcgccgaaaaccgggcattcatccggggagtcatcgcggccgggaataccaactttggcgaagcttacggcatcgctgggcggataatttcagagaaatgccggataccgctcctataccgttttgaactgttgggtactgaagaagatgtacaacgggtacgccaaggtattcaaagattctggcaacatgactcattagagaatatgtaattatgacttttcaaattaatgcacaacaagattatcatgctttaaatgccttgctcaatctgtacgatagtgaagggaatattcaatttgacaaagacaagctggctattcattgttattttcgccagcatgtaaatccaaacacactatttttccatagcctaaaagagaaactggatttcctccaacaagagggatattacgaaataaacgtgctagagcaatacgattttactgttattaaaaagctctttcagcaagcctatagcaaaaaattccgctttcaaacctttctgggcgcattcaaatattacaccagttatactctgaaaaccttcgataataaacgttatctagaacgctatgaagatcgggtatgcatggtagcactgaccctagcccaaggcgatcagatgctggcttgtcgtctagtggatgagatgatcagtggccgttttcaaccagcaacgccaacttttcttaattgcggtaagaaacagcgaggagaattggtttcctgtttcctgctacgcattgaagataatatggaatccatcggacgttcagttaattcagccttacagctttcaaaacgtggcggtggggtcgcattcttactcagtaatctacgggaaacgggtgcaccgataaaaatgattcaaaatcaatcatcaggtgttatcccagtgatgaaaatgctggaagatgcgttttcatacgctaatcaactcggtgcacgccaaggtgcaggtgccgtttatctccatgctcatcaccccgatattcttcgttttctggatacaaaacgggaaaatgccgacgaaaaaatccgtataaaaacgctctctattggcgttgttattcctgatatcacttttaagctggctaaacataatgaagatatgtatctattctccccatatgatattcagcgggtttatggtgtgccaatgtccgaaattagcatgacagaaaaatatgctgaaatggtaaataaccaacaaattcggaaatcaaaaatcaatgctcgtgaatttttcatggcattagctgagctccaatttgaatctggttatccttatattatgtatgaagacacagtgaataatgctaacccgattaaaggtcggattaatatgagtaatttatgttccgaaattttacaggttaacagcgccagcgaatatgaagaggatttaagttaccaccatattgggaaagatattagttgtaatctgggatcaatgaatattgctcatacaatggattcacctgattttaccctctctattgaaacggctgtccgcgctttaaccgcggtatcagatatgagccatatccgttcagttccttctatcgaaaaaggaaatcaggattctcatgctattggtttagggcaaatgaatcttcacggctatctggcaagggaaaaaattcattatggttctgaagagggaatagatttcaccaatatctatttctatatcgttacttatcacgctctgcgtacttccaatcagatcgccattgaacgtaatagctactttaaaggctttaaagattctcgttatgccaatggtgaatttttcaataaatatacagaaataacatggcaacctcagacaaaaaaagtttctcaattgtttgaacaagcaggaataaaaattcctaatcaacaagactggcttgaattaaaagcctcaattatggctcatggtatttacaatcaaaatctccaagctattgctcctacaggttctatttcatatatcaacaattcaacctcaagcattcacccgattgtatcccgtattgagatccgtaaagatggtaaaacaggtcgggtatattatccagcgccatttatgacgaataataatcttgaatattaccaagatgcttacgaaataggaccggaaaagattattgatacttatgctatagccactcaacacgtcgaccaaggattatccctgacacttttcttcaaagacgatgccactacccgtgatattaacaaagcgcaaatttatgcctggcgtaaaagaattaaaacactttattacatccgtctgaaacaaacggctctggaaggcactgaagtacaagattgtgtttcatgctcactataaaatgattctggaaatgtattatgatcagtaatcctatatgtgcaattaactggaaccgaattgaagatgacaaagatctagaagtttggaaccgactgacaactaatttttggttaccggaaaaaattccattatccaatgatattacttcatggaatacactgacgacagaagaaaaaaagctgactatccgggtattcaccgggctgacactactggacacaattcagaacactgttggtgctccagcgttaatggaagatgccctgacaccccacgaagaagcagttatgtccaacattagtttcatggaagctgttcatgcacgttcttatagctccattttttcaacattatgcctaacaactgatgtagatgacgcctatcgctggagtgaaaagagtttttcattacagaataaagccaaaattatactaaattattatagttatcatcatccattaaagaaaaaaatcgccagtgtttttctagaatcatttttattctattcaggtttctatttacctatgtattggtcaagtcgaggaatattaacaaatacagccgatttaatccgacttattatccgagatgaagccattcacggttattatattggatataaatttcaacaatcattaaaaaaacattcaacactagagcaaaaagagattaaagaattcactttttcattattattagaattatacgaaaatgaaatcaaatatacagaagaactttatgatattgttggctggactgaagatattaaaaaattcttgcattataatgccaataaagcattaatgaatcttggatatgaaaccttatttccgccagaaataacaaatgtcagccctacaatcctctctgcattatcaccgaatgccaatgaaaatcatgatttcttttctggttcaggttcatcatatgttatcggtaaagcagtgaatactgaggatgaggattggaatttttaaagagaatgattttattttatatagaaggaatacttcaaaataaccataatactctaatactttaaaaaccaatattattgatcctgttttttaaacgataaaacgccataaaatccttatatttttatggcattttttcatgactattgccatttctatggatattttttgccatctccgcctcttatatcatccgaaacgacaaaaaacattaatatagctaattaattttaaattaaatttcattctaataagacataatcaacatgataaactaataagcgattctatttacaacatagtgaataattcatttgtcgatcaaatttaaaattcattaataacaacaacatagatacaattaacccttacaatgaccgcatggatttgggtaaaatgaatgactaataaccatgaaataactacaaatatatctaatttaagtcattcaatatcactattttttacattaattatcattaacatagggttgtcaggctctctcagtatgttagggtatatatattcaaagaatcatgcagagatgaataatgcataacaccattaaataaccattgaaaggaaagtaactatttcatggcaattaaacttgaagttaaaaacctctataagatatttggcgaccattcagaatatgctttcaagttactgaattcgggtttgagcaaagatcagatatttgaaaagacaggtatggttgttggtatacaaaatgccaatctgactattgaagaaggcgaaatatttgtcatcatgggattatctggctccggcaaatccacaatggtacgccttctcaatcgtctgataaaaccgactcgcggccaagtattaattgatggtgaagatatttctgagatttcaacagcagcgttaagagaaattcgccgtaacaaaatcagtatggttttccaatcatttgcactgatgccacatttaaacatactggaaaacagcgcctttggtatggaacttgccggaatcaccaaacaagaacgcaataaaaaagcattggatgcactgaaacaggtaaacctggaaaattatgcacaatcttatccagatgagctctcaggcgggatgcgccaacgtgtagggcttgccagagcattagctaataacccagatattttgctaatggacgaagcattttctgcccttgatccattaattcgtacagaaatgcaagatgaactgctaagcctgcaaggcaatcagccacggactatcgtctttatctctcatgatttggatgaggcaatgcgtatcggagaccggattgccattatgcaagacggtgttgttgtgcaggtcgggacacctgatgaaatcttgaataatccagcgaataactatgtgaaaactttctttcgtggcgtggatatcagccatgtattcagtgctaaagacattgcccgtcgccgtcctgactctctgcttcatattgcacccggttttggtcctctttctgcattgaaagtccttgatgacgaaaacagaaactatggttacctgatcgaacgtggacaaaaattcgccggtatcgtttccgtaaattcattggaaaaagcattacgggaaaaaaaacctatcgaacacgccatattggcggaaccaacctccgttgccgcagatatgcccctcaatgagctgattgctgttgtagcacaatcaccttgtgcagttccggtggttggaaataatgacaaatatatcggcgttatttccaaagggatgctattgcaggcattagataaggagacaccaaatgagtaatcaaaacgaacatcaaactcagcctgtacagaattcagaggataccccgtccatcgctgccgataataccgacccctggagcagtggaaccagtgctgacaatgcaacgggttctgactggctggatgcccccgcaactgcggtacagcctgaacattttaatatcatggacccattccagcacccacttatccctttagactcatgggtaacccaggctattgattggattgtgctaaattttcgtcctgcatttcagggaatccgcgtccccattgattttgttctcagtggctttgaacaatgtctgacgtcaatacctgctcccattgccatcctattttttgccctgattgcctggcagttatcaggcattggtatgggtattactgctctaatttctctggtaattattggtgaaattggtgcgtggcacgaatcgatggtcactttatcactggctctgacatcgctattgttctgcattatcgttgggttaccactcggtatatggctggcacacagcaagagagccgcgaaaattatccaacctctgcttgatgccatgcaaaccacaccagcattcgtctatctggttccgattgtcatgctgtttggcatcggtaacgtgcctggagttatcgtcaccattatctttgctctacccccaattgtccgtctgacaattttaggcatcaaacaggttccagcagatctgatagaagcagccgaatctttcggcgccagccctcgtcagatgctgtttaaagttcaattaccactggctatgccaaccattatggccggtgtcaaccaaaccctgatgctggccctatcaatggtcgttattgcatcaatgattgccgttggtggtttaggccaaatggttttgcgaggtattgggcgtctcgatatggggcttgctacagtaggtggggtcgggattgttattcttgcgattctccttgaccgcctaacacagtcttttggctacagcaaccgggctaaaggcgtaaatcgctggtatgccactggcccaattggattagttacccgtttatttagccaaaaagcataaccttccaaaacacctatcaaaccacaattgtttggtaaacacatgatgactgcaacaggaggaaaaaccatgcgcaaaatagttatctgggctatatccctgtcatcactgataagttctcaattattcgctgtcgaattaccgggtaaaggtatcagtgtacaacccatacaaagcacccttagcgaagaaacattccagacgctgatcgtcagtaaagcattggaaaaacttggttatgatatcaaacccatcaaagaagtggactacaacgtcgcctattcctctattgcttctggtgacgcaacctttatggccgtaagttgggaaccactgcacaacacccaatatcaggcagcaggtggtaatgccaaattttaccgtgttggtaactacgtagaaaatgcagcacaaggctacttgatcgataaaaaaacagcggaaaaatacaacattactaatattgctcaattaaaagatccgaaaatagccaaattatttgataccaacggtaacggcaaagctgatttaactggctgtaatcccggttggggctgtgaaatcgccattaatcatcaccttaaagcctatggtttaaacaatagcgttgaacacaatcaaggtaactatgcagccatgatggcagatactattacccgctataaagaaggcaaacccatcttatattacacatggacgccttattgggttagtgacgtgctgaaaccaggtaaagatgttgtctggctgcaagttcctttctccgctatgcctaatgatgagaaaatagagacgaaattaccaaatggcgctaattatggttttccaccaagtattatgcatattgctgccaataaaaaatgggcagaagacaacccaaccgccgctaagttattttctatcatgagaatgccccttgcggatatcaatgcccaaaacttgcggatgcataatggtgaggcatcaccagcgaatattgaacgtcacgccaacggttggattaaggctcatcagaaattatttgatagttgggttaaaactgctgttgaagccgccggaaaaaattaatacttagaacattacagtgaattggtataaaacaattcactgttttttactgttattttttctgactcaaaattcttattaaaatttatatttcaacaattttatagtcattatcgctgtattatagagaaataataagaattaatatcgttttcacatttcattctcagttcaatttggtagttaaatcacaaggttaaactacctaaaacaatgaatactcatggagtttctttaacaaccattctctcggctttaccattgaacctgaataaaaattcattacaatgcaaaaaatttagctcgtgacgacagaccgttaacgagctgtccactcaccctaacctaccgtttaaatataagaaaatacattatatggaagaaaatatttcccgtacgccattaagcccagcgttgattgcactaatcgccattgccacaggtctggttgtcgccagcaactattatgcacagccgctactcgatactattgcgttacaatttaatctgaccgtcaacgaagccgggtttattgtaaccacagctcaattgagctatgccgttggcctaacattccttgtgccattaggtgatatgttcgaacgacgcagtttaattgtctcaatgacaatattagccactattggattactgattaccgccacgtcacagaacatctggcaaatgttactgggaacggcaatgacgggcttattttcggtggtcgctcaaatactggtcccgctggccgcaacacttgctcttccccatcaacgaggaaaagctgtcggtacaattatgagcggtttactgcttggaatattactagcaagaaccatctcaggaacaatggcaactcttggtggctggcgaactgttttttgggttgccagtgtcttattggtgattctttctctgacgttgtggcgctacctgccccgttacaaacaagtaaccaatctcagttatttccaattacttggctctattgtaaaccttatcactacaagcccgcttctaagagtacgcgccatactgggtgcactgacatttgccaacttcagcctgctatggacatcaatggcattcctgctttcagcacctccttttaactattctgaaggagtcatcggcttatttggattagtcggtgctgccggtgcattgatggcaacccaaaccgggcgactcgttgataaaggaaaaggccctctgaccaccagcatttctctggtgctattacttctttcatggataccgatcggtttagtcaaagaatcactaattggctttataattggtgtttttctccttgatattgcgattcaaggagttcacgttacaaatcaaagtacaatataccgcatcatgccagaagccagaaaccgactcaccgccgcttacatgactagctattttatcggtggagctcttggctctctggtttcaggctatgcttacaaacactcaggttggtatggcgttgccaccgcgggtatagctatctgtataatcagcctaatcgtgtggtttttaggcaaaaagtacgaaccaaagacgttgtaagaaacaggtcatagtaaaagaatgcttaaataaaaacatttatgaaacatttgttaaggatgatattctctatttggtttcattttgttaatgttacataacattcacataaccagatagattctatgcctgtttctgatacatcatcccccttaacgagtaaaaaatcttcttttactgaaggaataatagatagtttacccattgttatcggttatattcccgtcgcctttgcttttggtctcaatgccgtcaaacttggcttcaacccaatggaagccattttcttttcatgcatcatctacgccggtgcaagccagttcgtcatcacagctttactgagtgcggggacatcattatggatttctgccctaacaattatggcaatggatgtccgccatattctttatggtccatctttaaggcaccgtatcaaagataagctaacggagaaaaaaaccgttatctgggctttcggcctgacagatgaagtttttgccgccgcgactgcaaaactcattaaaaaccaccggagctggagtgaaaactggatggttgctattgcaatctgttcttggctggcctggggcgcaggtaccgcagccggtgcatttcttggtaacggttatttggaatcctatcccgctatagaagctgccatgattttcatgttaccagcactatttctcagttttcttcttgcttcttgtagaaaacaaaatagttattgtgttgcaaccgcactaaccggagcacttttagggattacatttttctcaattccagttgctattctggcaggtattgtcggtggttgtatcgcggcactgttacaaccgcaaaacaattgcaatgactcttcagaacaaaaggaaacaccatgattgatagcaagattttgctgattggactatttgttgggttagctaacttttcatttcgctatctgccactacgatttgggaaagcacgccaatctgccggcagaaaagctggaaaaacaagcattatccttgacagtattggtattgcatccatttgttctttactcatcgtatcaggtgtacctgatgtgatgagagaaagtcaaaaactacttcctaccctcataggttgtctgaccatctgtttagtcttttacaaaacaaagcaaattatactcgcaacactatttggcgcactgctttttggactaacattcaaaatatttatgaattaggtatcaatatcaaaagaaatatgatgataacaaataactacaattgctaaatttatcttttaatataccatttggatgtttgataacaaaagttatcttaccagttgaaactaataaggtatctaaataatggaaagttcgtttacgcctaccgaagaattactgaatattcgtgcagcacagcaagccaaattaaataaagatatcccttatcaagagatcctgttgactaggttatcaatgcacgtccaaagtaaattgcttgaaaaccgtaacaatatgctgaaagctcaaggtatcaatgaaactttgttcatggccctgatgatccttgatactaaagaaagccacagcatccaaccatcagaattaagtgccgcattaggttcttcccgtactaacgccacgcgtattgctgatgaattagaaaagcaggagtggattgagagaaaggaaagtcataacgatcgccgttgccttcatcttcatctgacagaacaaggtacaaaatttttaaatagtttgcttccacctcaacatgagtgcctgagaagactttggtcatgtcttgaccaggaggaacaaaaacagttagaaaagttaatgagaaaattactggtcagacttgatacaatgggcgattgtatcaaaaaatagcttgttgtttaatcgatcaattttcacccaaacaatactttcttggttaaattgttcgaaaaaattttcctgttagccaagatgatattttctgcaaaaagctaactattattcttcgataacattggatcctatgtcattcacctttccagtagtgatgctataccactactgggaagtgatctcaaaaatagtcttactagaagataaaacaacaagcatggggatttactatgagcgaaaatgaggcaatagaagtacaagcggcacaagatccaaccagtagtaaaaaaaggcaacgcagtcgtgccttagtgctactaacccttatctttaccctgctcggtgttgcctactttttctattggtttctcattttacgccaccatcaagaaacagataacgcctacgttacaggtaatcaagttcagatcatgtcacaagttgctggcagcgtaattacagttaactttgataatactgactttgtgaaaagcggcagtatattggtgcaactcgatccccgtgatgcagaattagcattagaaaaagcaaaaacaacattagccaacagcgttcgccagactcatcaacagatagttaacagcaaacaatatcaggctaacatcgctctacgcagatccgaattaactaaagttcaaaatgatcttagccgtcgtgaaatacttagcgttcaaaaagtcattggtaaagaagagttacaacatgcacaggaagctgtcgccagtgcccgagctgctctagatattgcaattgaacaatacaacgctaatcaagcaattgtcttggatacacccctagagaaacaacctgccattgaacaagctgcaacggaagtccgtaatgcctggctggcattacaacgcacgaaaatagtcagcccaatcgatggttatgtctcacgccgtagtgtacaagttggtgcacaaatcaataaaaatactccactgatggcgatagtttcggcaaacgatatgtggatcgaagctaacttcaaggagacacaaatttctggtatgcgtattggtcaaccagtggaaatcaccagcgatttctatggtggaagcaaagtatttagcggcaaaatcactggccttgatatgggtaccggcagcgccttctctttattacctgctcagaacgccagtggtaattggattaaggttgtacaacgtttacccgtccgtattgagcttaatcctggacaactagaaaaatacccattacgcatcggtctctcgactaaagtcagagtagatactacgagccctgatgggcccgttctgtctgataaaacacgcactaaatcagcttatcacaccactgctctgacaatagatatgtcgcctgccaataaaatagttaacaacattactaatagtaatgctggaaaataatatcggaggccaaggtgatgagacagccgcttacaggtgccaaacttgcatggatgaccatagcgctatccttagcaacgttcatgcaagtgttagattctaccattgctaacgtagcgatacccacgatttcaggtaacttaggatcatcaagttctcaagggatctgggtaattacctctttcggggttgccaatgcgatttctatcccaattactggatggctggcgaaacgcatcggcgaggttaagttattcatctggtcaaccgcgctattttccatcgcttcttggttatgcggtatttccaacagtcttggtatgctaatcttcttccgagttattcaaggattagttgcaggtcctcttattcccctttcacaaagtctactcctgaacaattatccaccagccaaaggaaatatggcgctggcattatggtcaatcacgattatcatcgcgccaattttcggccctattctgggtggctacatcagtgataactaccattggggatggattttctttatcaacgttcctgttggtatagcgattattttgattgctatgcaaacgctgaaagggcgtgaaacccagacagagatcaagcctatcgacacaataggactcatgttattagtggtcggcgttggttgtttacaaatcatgctagatcaggggaaagagctggactggtttaattctacagaaattatcgtcttgacagttattgcaatcatctcattaacatttctggtggtatgggaactgaccgataataacccgattattgacctatcactgttcaaagagcgcaattttaccattggttgcttctgtttgagcttagcttatatgctctatttcggcaccattgtgttattacctcagttattacaggaagtgttcggttatacagcaacctggtcaggtcttgcatcagcaccagtaggattgttgccactaataatttcgccactgattggtaaatttggcaataaagcagatatgcgctacatagtgacattcagttttgttgtctatgccatctgttattactggcgtgcatatacattcgaaccaggcatggattttgccgcggtcgcatggcctcagtttatccaagggtttgctattgcctgtttctttatgccactcacaaccattaccctttccggcttgccagcagagcgggtggcatctgcatccagtttatcgaattttattcgaacactggcgggttcaataggaacatcactaacgacaaccatgtggacccaacgcgagtcaatgcatcattcccattttactgaacatatcaatccttatagtcccgatactcaacggatctatcaacaattatcggaattaggcatgaataaccagcaaatttctgcttatctagcaaaagaagttacccatcaagggctcataatctcagcgaatgaaattttttggctttccgccggagtattcctgattttgattatgctcgtctggctagccaggccaccatttacccaaggaagtaaagaaggcatgagcgcagcccactaaatcttaaatagcaaaaccgggagcacactccagctcccgcttttcctaatcaagctttattctgtcgccaccattcagccagcataatgcccgttgcaacagaaacgttcaggctttcaaccaaacccgacccaccgacgaacaaactcatatcaccatgttcccaagcactgtcactcaaaccatcgcgttcttgaccaagtaccagaaccattttttccggtaattcagctttagctaaagcggtactacctttatggctggatgtcgtaacaatggtgtaacccgctttacgaaagttattcagcgtagtgaccaagctatcagcatcaatacctttaatatgctcagcaccaccttctgctgtacgaatagccgcgcccgactccagcaaggccacatcctgcaaaatcaccccttgcacaccgaaatgtgcacaacttcgcataatcccgccaaggttatgaggattacccacatcttcaagagccaaaacacaatcttttactggagcatctttcaagtaggtctctgcatccaaaccgttgcgtttcttaatcagaaaacaaacaccaccatgatgttcagtacctgacacttttgtcagttcagcctcatccacaacatgataggctttacgattagcagccatccatttcagcgcattgcggaaacgtggtgtcactgactcaacgaaccatgcacgaactatcgcttcagaacggtttttaaacatcgcctgacaagcattttcgccataaatccgagtttcttccattcgctgacgacggagctgttcaggatcaatctggcttttcccactgataccaccatgcattggcgttacagaatcactctcagggcgtgacactgttttccaaggcgatctttcacgctcattggcacgcggagaacgggatgttcgctcattgtcccgacgacgctgaccctgatcacgtcccttaccagatggacgtttgttattattacggctgtcattaccgccctcactgcggacatacatcactttgactttgccatttttaccactgtatgaatcgttcattcgtttctccaactgctttatggcgcgaagattacctgatgtgcgcatcttaagctacctctgacaactataatccattaaaatgcgcccttaattttcctgctttcggcgagacatgccgtacttgctatggagggcacagtctggctacctgttgaaacagcccccaccgaagatattcaagctacagcttggtactattttgcaacaaactggcaatttaattacttctcagcaactgcatccgatagcgtaaatcacagcaacaatttgcgaaatccgctacagttatcgactaaccccacgaataaggagcctcctgatgagccagcgcggacttgaagctttattacgccctaaatccattgcggtaattggtgcctcagaaaaaccagaacgagcgggttcagttatgatgcgtaacttgcttgcaggaggctttgccggaccaatactaccgattacacccaatagccgttctgttcaaggggttttagcttacccttcaatagataaattaccgattacaccagacttggctgttatttgtactcatcaccgccgtaatttgcaatgtttagaacaactggggcagttgggttgcaaaacggtgattatcctttcttcaccaacgtcccaattcgctgaactaaagcagtgctgccagcactatagtatccgactacttgggccaaacagtttaggtgtattagccccctggcaagggctgaatgccagcttttctccggttccaatactcaaagggaaattggcctttatttctcaatcggcggcagtctcaaatacgattcttgattgggcaaaacaccggggagtcggattttcctactttatagcattaggtgacagtgtagatatcgatatcgatcatctgcttgattttctggctcgtgacagtaaaaccagcgctatcctgctctatttagagcatattcatgatgcccgtcgctttctttcagcatctagaagtgcttcccgcaataaacctattttggtggttaaaagcggccgtactaagcgagcacagaaattacttggtgaacaacaaaatttggatgcggcttatgatgcagcaattcagcgagcagggttattacgcgtacaagatacacatgaaatgttttctgctgtagaaacgttaagccatatgtcacctttacggggagaacggctatttatcgttagcaatggtgcttctccagccgcaatggcgctggatgcgttattccgccgtaacggcaagctcgcaatattaggtgaagagacaacgaaagcattaaaaatacaactcccagaaactatctctctgcataacccgctagatttaaaagatgactccacggtggaacgttatatcgctgcgttaaaaccgttactagatagccacgaccatgatgctctgttacttattcactctcctagcgcaattgctccctgtattcaaactgcaaccaaagtcattgaaacaatccgtaaacacccacggggaaaatggctaactatctttaccaattggtgcggagaatactcttcacaagaagcccgccgtctgttcagtgaagcaggtattccaacttatcgcacccctgaaggcgcgattactgctttcatgcacatggttgaatatcgccgcaatcagaaacaattaacagaaacccccgcactaccagcaaacatcacagctaacacagcacgtgcccatcagtgcatacaacaggctctggaacagggaaattctcggctggatacccatgaagttcaacctattctggaagcttatggtctcaatacattgccaacatggattgctcataacagtgatgaagcagtcaatattgcccaacagatcggttatcctgttgcgttgaaattacgctcgccagatatcccgcataaatcagaagttcagggagtcatgctctatttgcgaaatgcaaatgaggtcaaggcttctgctcaagcgattatcgaacgcgtcaatcagaatttcccacacgcaagaattcaaggattgttagttcaaagcatggcaaaccgcgctggtgcacaagagctacgaattgcagtcgagcaagatgaagtatttggcccactgattatgttaggtgaaggcggtattgaatggtcacaggaaacacaagcagccgttgcgctgccacctcttaatatggcgttagcgcgatatctggttattcaggcgattaaaagtagaaaaattaagctcaggggagctcctcaatcattagacgtactagcactcagccgactgttagttcaagtatcgaatctgttacttgattgcccgcaaattgtacgactggatattcatccattactggcttctggcgatgaattcacattattagatgtttcaatggaattatcttcgatagacggtgatccacgaactagattagctatccgtccatatccaagcgaactagaagaatctataaaactcaaaggaggtgcagaatgcctgctacgtccgattctgccagaagatgaaccgctgctgaaagatttcatcggccaggttacgaaagaagatctctattaccgctactttagtgaaatcagcgaattcacacacgacgatctggccaatatgacgcagattgattacgaccgtgaaatggcatttgttgccgtacgacatcctaaaacgaccccagaaattatcggggtgactcgtgccatagctgacccagataatgtcgaagcagaattcgctgtgctagtgcgttctgacttaaaagggatcacccttggatatcaacttatgataaaactgattaactatacacgggaacatggcataagccgcctcaacgctatcaccatgccagaaaaccgtacgatgataaaactggctaaaaaactgggatttaccatagatgttcaatttgaggatagcattgtaaacttatccctcgaactctaaatcaactacgtgatggaccgcacagacttgaatcattaggcattagagcgttaaatcatgctcacaattagccagactaatggtattatcgccagatcatttgatgcattgctttacatagtagtcctttagccatctaacataagagaaaaagcgcactgtgatgttgtctaaattcaaacaagctaaacatcaacaacaccttgcacaactgcctaagctacctcagtcagttgctgatgttaaaacactttatcaacctgaagtgttccgcagcaccctgctggaaaaaattgctaacgctgaaaaacatatttatatcatctccctctatctggaaaatgatgacgcagggaaagatatccttaatgcactttatacagctaaacaacaacgcccagacttggacattaaagtgctcgttgactggcatcgagcacaacgtggacgaattggtgctgctgcaatagtaacgaatgccgattggtattgttctatggcagaagcttatcctgatgtgaaaattccagtactaggtgtacctgtaaatacccgcgaagcactgggtgttttacatttaaaaggttttatctttgacgatactgtagtttatagcggagcaagcattaatgatgtttatctccaccaacatgataaatatcgctatgatcgctaccacttgcttcacaatgcagaacttgcagaagcaatgaaacactttattgataatcacattatcgctacaggagccgtgcagaaactggattgtaaaaaccgtcctcgtattcctgaaattaaaaatttgatccgtcaattacgtttttctctgcggcacactacctataaaataaacaatcaggcaacgaatgatgaactatctgtcactccacttgccggtctgggaaagaaaaatctactaaataaaaccattagtcatctgatcgccagcacagaacaaaagctgattatttgcactccgtattttaatcttccagccatcattgtccggcggatcgttcatctacttcgtaaaggtaaacatgtggaaattattgttggtgataaaactgccaacgatttttatattccaccggaagaaccctttaaaattatcggtgcattaccctatttatatgaaattaatctgcgccgtttcatcagtagactacagcgttatgttgacaacaatcaactgactatcaggttatggaaagatggtgataatagctaccacctaaaaggtgtgtgggtggacaatcaatggcaattgattacaggaaataatcttaatcctcgtgcctggggactggatttagaaaatgccattcttattcacgatcctcataaagaaatgcaggagcaacgtacaaaagaactgcactgtatccgtactcatactacggttgtcagtgattatcaggaattggacagcatccagctttacccagtcaaagtacgtaaacttatccgccgtttacgtcgcatccgggtagacaaactgattagtcgtattctgtaattgaatcgataaagcgaattatcttttctaaataaaatctcctgatattgaataatttcgggagatttttaccatcgaactttaatttgataaatctcaaattttcttaaataagagtaatattcaaaagtacgtaaatctagatttatacccgttatctttcaagttgcctctttgttggctgcgcgctctcaccccggtcacatcgttatctatgctcccggggattcgctcccttgctgtcgcaatgcatcttgaaattagggtatagagagaaatttttgtcatgctcggctaagcttaggataacatgactcattttctttcccatcagttcaaaaagttatttaaattattttttatgcctgctattactataatatattttaattattcaagactgataaacaaactatctgtttcttaaagggaataagtaaataaataataccttaaaacgcaaaaacccccagctttcgctgagggtttctacggtatttaaagcctggcagtgtcctactctcacatggggagaccccacactaccatcggcgctacggcgtttcactgctgagttcggcatggggtcaggtgggaccaccgcgctatcgccgccaggcatattcggttttcttccggccgttgtcgctcttctgccacaaccacccgaatcaatctctgaacaagcgaaaaatctctctctgctgtcttccgacaccaaaacaccttcggtgttgtaaggttaagcctctcggttcattagtactggtcagctcaatgcatcgctgcacttacacacccagcctatccacgtcttcgtcttaaacgttccttccgtgacctcagtcaggggaagactcatctcaaggcaagtttcccgcttagatgctttcagcggttatctctcccgcacttagctaccgggctatgccattggcatgacaacccgtacaccagcggtgcgtccactccggtcctctcgtactaggagcagcccctttcaatcttcctgcgcccacggcagatagggaccgaactgtctcacgacgttctaaacccagctcgcgtaccactttaaatggcgaacagccatacccttgggacctacttcagccccaggatgtgatgagccgacatcgaggtgccaaacaccgccgtcgatatgaactcttgggcggtatcagcctgttatccccggagtaccttttatccgttgagcgatggcccttccattcagaaccaccggatcactaagacctactttcgtacctgctcgaaccgtcactctcgcagttaagctggcttatgcctttgcactaacctcacgatgtccgaccgtgattagccaaccttcgtgctcctccgttaccctttgggaggagaccgccccagtcaaactacccgccagacactgtccccggcccggtttacgggcccaggtgagaacatcgaacattcaagggtggtatttcaaggatggctccatgcagactggcgtccgcacttctcagcctcccacctatcctacacatcaaggctccatgttcagtgtcaagctatagtaaaggttcacggggtctttccgtcttgccgcggggacactgcatcttcacagcgagttcaatttcactgagtctcgggtggagacagcctggccatcattacgccattcgtgcaggtcggaacttacccgacaaggaatttcgctaccttaggaccgttatagttacggccgccgtttactggggcttctgtcaagagcctcgccttgcggctaaccccatcaattaaccttccagcaccgggcaggcgtcacaccgtatacgtccacttacgtgtttgcacagtgctgtgtttttaataaacagttgcagccagctggtctctgcgactggcttcagctccggaggcaaactccttcacctaccgccagcgtgccttctcccgaagttacggcaccattttgcctagttccttcacccgagttctctcaagcgcctgagtattctctacctgaccacctgtgtcggtttggggtacgattcaatatgacctggtgcttagaggcttttcctggaagccgggcatcaaccacttcaccgccgtagcagctcgtcatcacgcctcagtgttcacagaagagcggatttgcctgctcctcccacctacacgcttaaaccgggacaaccgtcgcccggatggcctagccttctccgtccccccttcgcagtcacattcagtacaggaatattaacctgtttcccatcagctacgcctctcggcctcaccttaggggtcgactcaccctgccccgattaacgttggacaggaacccttggtcttccggcgagcgggtttttcacccgctttatcgttacttatgtcagcattcgcacttctgatacctccagcaggcctcacagcgccaccttctccggcttacagaacgctcccctacccaataacacttgcgtgtcactgccgcagcttcggtgcatggtttagccccgttacatcttccgcgcaggccgactcgaccagtgagctattacgctttctttcaatgatggctgcttctaagccaacatcctggctgtctgggccttcccacatcgtttcccacttaaccatgacttcgggaccttagctggcggtctgggttgtttccctcttcacgacggacgttagcacccgccgtgtgtctcccgtgataccattcttcggtattcgcagtttgcatcgggttggtaagccgggatggccccctagccgaaacagtgctctacccccgaagatgaattcacgaggcgctacctaaatagctttcggggagaaccagctatctcccggtttgattggcctttcacccccagccacaggtcatccgctaatttttcaacattagtcggttcggtcctccagttagtgttacccaaccttcaacctgcccatggctagctcaccgggtttcgggtctataccctgcaactctttcgcccagttaagactcggtttccctgcggctcccctatccggttaaccttgctacagaatataagtcgctgacccattatacaaaaggtacgcagtcaccctgattaatcacggctcccactgcttgtacgtacacggtttcaggttctctttcactcccctcgccggggttcttttcgcctttccctcacggtactggttcactatcggtcagtcaggagtatttagccttggaggatggtccccccatcttcagacaggatttctcgtgtcccgccttactcatcgaactcacagccataccatcttcgagtacggggctgtcaccctctctcgccggcctttccagaccgttcctctgatgctatcgctgatgcaggttctgggctcctccccgttcgctcgccgctactgggggaatctcggttgatttcttttcctcggggtactgagatgtttcagttcccccggttcgcctcattaacctatgaattcagttaatgatagtgcaacgcattgcactgggtttccccattcggacatcgccggctctgtcgcttcatatcagctcaccgacgcttttcgcagattagcacgtccttcatcgcctctgactgcctaggcatccaccgtgtacgcttagtcgcttaacctcacaacccgaaactgtctcggactgttcagcttgagagacacctcaacaatacctcgggggtattattgagtatttcaatttttcagcttgttccagattgttaaagagcaaaataattcgcagcatactgtcgccaatatactctgaattaggttgaatatggtggagctaagcgggatcgaaccgctgacctcctgcgtgcaaggcaggcgctctcccagctgagctatagccccatacagaaatagaccgtcatcgcctgttcagtcaactcgcttaacctccggggatttcaacgcgagtaacgcagtgtgcgcgagcacatgagtcacgcagcgtctggaagacccagggataagtagagttggtaggcctgagtggacttgaaccaccgacctcacccttatcaggggtgcgctctaaccacctgagctacaagcctatcgcgataacgttttctcttctttcatcagacaatctgtgtgagcactgcactcaacctctctcaggtaaggaggtgatccaaccgcaggttcccctacggttaccttgttacgacttcaccccagtcatgagccacaaagtggtcagcgcccccctttcggttaagctaccgacttcttttgcaacccactcccatggtgtgacgggcggtgtgtacaaggcccgggaacgtattcaccgtagcatgctgatctacgattactagcgattccgacttcatggagtcgagttgcagactccaatccggactacgacagactttgtgtgttccgcttgctctcgcgaggtcgcttcactttgtatccgccattgtagcacgtgtgtagccctactcgtaagggccatgatgacttgacgtcatccccaccttcctccggtttatcaccggcagtctcctttgagttcccaccttcacgtgctggcaacaaaggataagggttgcgctcgttgcgggacttaacccaacatttcacaacacgagctgacgacagccatgcagcacctgtctctcagttccctaaggcacttcgctgtctccagcaaattctgaggatgtcaagagtaggtaaggttcttcgcgttgcatcgaattaaaccacatgctccaccgcttgtgcgggcccccgtcaattcatttgagttttaaccttgcggccgtactccccaggcggtcgatttaacgcgttagcttcggaagccaccgttcaagaccgcaacctccaaatcgacatcgtttacagcgtggactaccagggtatctaatcctgtttgctccccacgctttcgcacctgagcgtcagtcttcgtccagggggccgccttcgccaccggtattcctccacatctctacgcatttcaccgctacacatggaattctacccccctctacgagactccagtcaaccagtcttagatgccattcccaggttgagcccggggatttcacatctaacttaattgaccgcctgcgtgcgctttacgcccagtcattccgattaacgcttgcaccctccgtattaccgcggctgctggcacggagttagccggtgcttcttctgcgggtaacgtcaaagtccagccctcttcaggctaaacccttcctccccgctgaaagtactttacaacccgaaggccttcttcatacacgcggcatggctgcatcaggcttgcgcccattgtgcaatattccccactgctgcctcccgtaggagtctgggccgtgtctcagtcccagtgtggctggtcatcctctcagaccagctagagatcgtcgcctaggtaggccattaccctacctaccagctaatcccatctgggttcatccgacggcgtgaggccctttcaggtcccccactttggtctcgcgacattatgcggtattagccaccgtttccagtggttatcccccgccctcgggcagatccccagacattactcacccgtccgccgctcgtcagcaaaagcgcaagcgctttcctgttaccgctcgacttgcatgtgttaggcctgccgccagcgttcaatctgagccatgatcaaactcttcaatttaaagtttgatgctcaaagaattctgactaattatttcgtaatgaattaactgttgttcactcttcaagactttaaaacgtatttttttgtgatacggtcttgtgagtgcccacacagattgtctgattaattgttaaagagcaggctgacataaaaaataatattctcgttcagccgggctgcgtatactacgctgttcgcccgcagagtcaagcactgattatcgctttctctgcccgacctcacaatgtttatcagcgttgtgtcggtcagtggtggcgcattatagggcgttctttgacgctggcaagcatttaattacaaaaagaatccattcgaacatcaattaagcaaaaacaaggctagattgcgatttaatgcgcaatatgataaaaaaagaggcagtttcctgccccttatctctcgttaaatataacgttattgctttgctacgatatggctattttccacatccagagtaactggttttcctggcaatagttggccggaaagtatcttttgagctagtgggttttcgatttcctgctggatagctcgcttcaatggccgtgctccgtaaacaggatcgaacccggcttctgccaatatttccaacgcttgctgagtaatcgtaacctgataaccacgttcttccagtcgcttgtataaacgttgcaattggatatctgcaatcgctgacaaatgccgacgccctaatggatggaatacaacagcttcatcaatacggttaataaattcaggtctgaaattatggctaacaattcccatcactatatctttcatttcatcataatttagactaccaaaacgctcttggatcatgtccgacccgagattagaagtcatgatgacaaccgtgttacggaaatcgacagtacgaccttgcccatcagtcaatcgaccatcatccagcacctgtaataagatattgaatacatccgagtgcgctttttccacttcatcaagcaaaataacggaataaggtcgacgacgaaccgcttctgttagataaccaccttcttcataaccaacatatcccggcggtgctcctaccaaccgtgatacggcatgtttttccataaattcagacatatcgatacgcaccattgcatcatcgctgtcaaacaggaaattcgctaacgccttacacaactcagttttaccaacaccggttggaccaaggaacaggaatgagccaatcggccggtttggatcagccaatccagcacggctacggcgaatcgcattagatattgcattgactgcctcatcctgaccaatgacacgtttatgcagctcttgctccatgcgcaacagtttatctttttcactctcaagcattctggcaacaggaatacccgtccaacgagcaagaatgtctgcaatttccgcatcggtaactttgttacgaagcagtttcatatgcttactttcagcttgtgtggctgcggcaagttgtttttccaatccaggtatttttccatactgaatttcagacatcttcgctaaatcaccactgcggcgtgcctgttctaaactgatacgggcattttccaattccgcttttatgtgctgagtacccgtaagtgctgctttttcagctttccactcttcttctagttcagagtattcgcgttcttttacgagcagctcttcattaagcatttcaagccgttttttactggcatcatcagactcttttttcagcgcctgctgttccaacttcaattggataacccggcgttccaaacggtccagcgcttccggttttgaatccatttgcatacgtaaactggcacccgcttcatcgatcaagtcgatagctttatccggcaacatacggtccgagatataacgatgagataatgttgctgccgcgacaattgcagggtcggtaatttgtacatgatgatgtaactcataacgctctttcagaccgcgcaaaatagcgatagtgtcctctacggaaggttctgcaacatagactttttggaaacggcgttccagcgctgcatctttttcaatatattgacgatattcatccagtgttgttgcaccaacacagtgaagttcaccacgggccaaggcgggttttaacatgttaccagcatccattgccccatcagccttaccggcaccaaccatagtatgcaattcgtcaataaacagaatgacattgccttcctgtttagcaaggtcattcaacacacctttcaaacgctcttcgaattcaccacgatatttagcccctgctaacagcgcgcccatatccaaggaaaggactcgcttatttttcaacccctcaggaacttcaccattaatgattcgttgagcaagcccttccacaatggcagttttaccaaccccgggttcaccaattaaaaccgggttatttttggtacggcgttgtaatacctgaatggtgcggcgaatttcttcatcacggccaatcaccggatcaagtttgccttgttcagcacgttcagtgagatcaatagtgtattttttcagggcttggcgttgatcttccgctccctgatcatcaactttttcaccaccacgcatttgttctattgccttagtgattttttcttttgttgcgccaacagctttcaatatgtcacttaatgtgccacgttcttccaatgctgccagaacaaataattcagaggagataaaattatccccggctttttgtgccagtttgtcacacagatttaaatgacgaactaagtcattggatggttgtacatcaccaccaataccctgtacccgcggcaagcgttctaaagccagctcaagctgattgctgaaacggcccgcatcgattccaattgacgttaataatgggcgaatagagccaccctcttgttttaacagtgaactcattaagtgaattggttcgatgaactgattatcatgcccaagtgcaaaggactgggcgtcagcgagagcaagctggaatttattagtaagacgatccagacgcataacacctccaatactattcagaattttgctactggagattaaatgaggccattcctcaaatattcaaggttattctgaaaagcaaattgtgagatattctctcatgcgccaacggatcgccctacgggataggttatatcagccagattaaagttgccatacgtccggtgatcccatcacgacgataagagaaaaatttctctttattactgacagtacattcatccccgccaaaaatcgctttcacaccaacagattgcaattttaactttgccaacaaatagatatccgctaaatacttttcgccaaaaggtataaaagctcgactcaaatcagcatgctggatagtgaacgcgtgcaaaacttcattgcccacttcaaatttttccgcaccaattgccggccctaaccaagcttggatctgatgaggtttagcgttaaattgagcaatcgtgttttccagtacgccggcgcataaacctcgccaccccgcatgggcagccgcaacctcatcaccagccgaactgcaaaatagtacaggcaggcaatctgctgtcatcacagcacaaacctgcccaggaatatgggtataaacagcatcagctctattatcttccagtggctgaccattgagtctcacaacacgcgtaccatgaacttgttctagccagacgggttgctgaggcagttccgccattttcgctagaatatgcctgttttgttcaacaacatccggtttatcacccacatgcttacccagattcaggctatcgtaaggtgataaacttattccccctaagcgggtagaactacaggcttttattgtcgtcggttgtggccagtttggaaaaataagcgaagtcatttaccaatccatttcgtctttaaatgcttctgcatctgcttttaatgccttaatcagcatcaccatatcgtcaggtaattccgcatgccattccatttcaatgccggttatcggatgataaagacgcagcatcgtggcgtgcaatgcctgacgatcaaagttacgcattacctcgcgaaactcatcagaagcccctttcaaaggacgaggacgaccaccatataaaggatcgcccaccaacgggtgactaatatgggccatgtgaacacgtatctggtgcgttctaccggtttccagtctcagccgcagacgagtatgtgccctaaaatgttccattacccgataatgggtaatagccggtttgcccattggatgcactgccatatgtgttcgttttgttggatgacgagaaattggctcttcaaccattccacccgctgtcatacgacctgtcgccaccgcttcatattcacgggtaatttcgcgtagttggagtgattcgactaaacgcgtttgagcgggaaccgttttagcaataaccatcagccctgtcgtatctttatcaagacggtgaacaatgcctgcccgagggacatcggcgatttcaggataatgatataacagtgcattcaataccgtaccatctgggtttcctgctcccggatggacaaccaaatcacgcgatttatttatgactagaatgtcatcatcttcatagacaatatttaacgcaatattctgaggttcccaacgcgcatcttcttcaatgatggcatcaatggcaatttcttcacctcccaacactttttcttttggcttattgattaatttgccattaacctgaactctgtcatccaagatccaatcttttatgcgtgatcttgaataatcagggaacaattcagccaaagcctgatctaaacgttgaccgagctgagattcggcgactgttgtattaagtcgtatttgttgtgccatatattgtttctacacttacgttgagttttgacggcagagccgtttaatttaatatagtgtgctattgtaactcgatcttttgccgggagcttcatggatagtctcccagaaaaacactcagaggataatcaacacgtgatgatacgcataaaatatctggtggcggcagccacattgagcctggcactttccgggtgcgctggtaataagaatgctgtccccgacagcccacctgcggaaatttactctaagggtcaggaaaagctgcaaaaaggtagctatcccgatgcgatcaagcaattggaaaccctcgataatcgctatccatttggcccctattcgcagcaagtacaactcgatctgatttatgcttattataaatcctctgacctgccaatggctctcgcttctattgaccgtttcatacgcctgaatccaactcaccccaacatcgattatgttctgtatatgcgtggattaacttcacaagcattggataacagtccattgcaaagtttcttcggcattgaccactcagatcgtgatcctgaacacgccagggtagcattcaaggattttagtcaattagtacgctatcatcctaacagcctgtatactgccgatgctattaagcgtttaatgtttatcaaagagcgcctggcaaaatatgaactttctgttgtggaatattataacaaacgtggtgcctatgtcgcggtggtaaatcgaattgaacaaatgttacgtgattaccctgatacacagtcaactctcgaagcgctgccttacatgaaaagcgcttatacacatttaggtttaatcgctcaggcagataaagtagcaaaactcattgctgctaatccggtataaaaaagcagacaataaaacagcggttggtgccgctgttttatttttacttatcaaatcccaaaaagaccgcttatcaattaggatgaataaaagactcaacttgtcaatagtgtctcattagcttcaatcctgcaatagatattctccgtatttttaccactaatcacaattacttcaactagttgtctcatacctgatcaaatagtgatttagatcacctttttcatgaaaaagaaatgtatgctgaaattattgaaggtggataatcaataatgagaggtaactatatgatagtgaatattaccagcaaacaaatggagattaccccggcaattcgcaaccacgtcgaaaaacggttaaacaaactaaataaatggcgagtaaatctaataaatcctcatattattctatcaaaagggcctcaaatttttagggctgatgcaaccataagtacaccaaatggtatgttagttgccggtgcaaagcatgaagatatgtatattgctatcaatgaattattaacaaaactggagcgccaattgaataaagtacagcataagggagaagcacgccgtactgacaacagtgttaaagaatcaaaccttaatctagaaacaccactagaaacagaaccagaaatatcacaataaaataacaatgacttgcctctaacgcgtccaacttggacgcgttttttgttgacagaaacaacaacataaggttaattaacaaaaaccaccgtaaacccttatccagtgcggacggctgccgataacatgggaagcttcgcccgattgagcaaagagcagtcacacaaactatgaatatgagaatatgatgaatacagcgcctccccatcgggaggcttttttctgtccattgcaaacctaattattatcagaatgtaaggaacccatttatggatcaaaataatttgctgaaaatacgggaaaaagtcagcgaacttgatttaaagttactgattttattagcagagcgtcgccaattagcttttgatattgcccaaactaagttacaggataatcgccctatcagagacaaggatcgcgaacgagaactactagatgttctgattaaaaaaggaaaaagctacgggcttgatggcttttatatttctcgtctctttcagatgatcattgaagattccgtcctcactcaacaagcattattgcagcaacacctaaatcaaacaccccaagattcagcacgtattgcattcctcggtcctagaggttcctactctcatatcgcagcccgccaatatgccgcccgccatttcaatcaattaattgaatgtagctgccataagttccaggatatcttctccttggttgaaacaggccaagcggattacggaatgttacccattgaaaataccagctcgggttccatcaatgatgtttatgacttattgcaacataccaatttgtcaattgtgggagaaataaccattcctattaaccattgcctactcgttgcaacagacacaacgctatcggagatcaaaacggtttacagtcaccctcaaccattccaacaatgtagccaatatattaatcaattcccgcattggaaaattaaatattgcgaaagcactgccgcagcgatgcaaaaagtcgccgaacagaattcaccagaaattgcagcgttagggagtgaagcgggcggtgcactttatcagttacaggttctggaacagaatctcgcaaatcaatcacataatattactcgttttattattgttgcccgtcagcctatcgaagttgcagaacaagtaccggccaaaacgacatttattatggcaaccggacagcaggcaggagcactggtagatgcgctaatggtgctgaaaaaacataatattattatgagtaaactggaatcccgcccgatcaacggaaatccgtgggaagagatgttttatattgatgtccaagctaatattcgttcaattaatatgcaacacgttctgaaagcattggcgaaaatcactcattcattaaaggtattgggatgttaccctacagaaagcgtggtaccggttaacccctcctgattaaaaagaaccgggtattaaaatatccggttcagattattggcttttaatattttgattatcaatgagaaaacttttactgcctttaaccttcggtttaaaggctttttatttatttcgtaaaccccgactttctcaggctaaataatataggttatcgtttttcgtgccatctaaaaataaggaattaaaaaactcccacttattcacgtaggataaatacgttttatctgaatgtgataaaaccggtgttaataaaaaccacgttttatctatcaccacggttttaaaacctgggaaaaaacggcaagcatatcgtgaaaaagaaggcaaaaactttaatcattaaaggtaaaacagaaatgattaaagtttttttaaagcaagtaaaaaatccggtgttatactgacaccggaagagaaaacatcagaaaagacaagttttaaacttattaacaaggtgacaaaatgacaacattaaccatagaacaagaatatgagattgtatcaaaacatttatcaagaatgtccgtgttaagaagatttgctcaaacaaaagatgttgaatggttagaagatgtttacaaagcattagagatagtcgttcaagacagcaaagaaaccttcagattaatgagtttagaagcggaacaaaaagaacaaaaacgtttagaaatattaaggctgattgaagaaaccggccttaatcttaaaaccattaacatacctattaccctctctgattttaaacctaaaaaatcaaatgcaggaaaaggaaagacgagaaaacctaagtatcagtttaacgagaatggagaagttaaatactggtcaggaaacggaaaaaaaccatcaggtttacaaaaactactcaatgaaggtcattcattaaatgaatttttaattaaaaaataaaaaacctcagaatgagaataacctcacaagttttaatcttatttactttccttttttgcttgcattcgctttttggggcgttcgcaagcgcctttttatcggtgattaactcggttattaatcaaaaaagtgttaaaaaaacagatatccattaatgccaaatttttaaaaagtaaggggcatctaaataaagcctattcccgccatatttaatttattcatcagcgatgctatatcccaattattttacgaagcaagttataaaaataacgcaataaaaaagggtaaaacatggttaaacccgtataccgattaaatccagaagttaacaccatgacgtttaataataatttaaaaactgccgatcgtaaaaccatcagtaaaaaataagaaataaaaaccgattttgttaatgcttaaaacgaatatgattaatattcattgagcgtaaaacaccgacataccatgatggttaaacttaataaaaaagggcattaaaagagggaaaaacaactgttaaaagggggttaaaacacgattaaaaccgtatgccgattaaacccagaagttaacaccatgacgtttaataataatttaaaaactgccgatcgtaaaaccatcagtaaaaaataagaaataagaaataagaaataaaaaccggttttgttaatgcttaaaacgaatatgattaatattcattgagcgtaaaataccaacataccatgatggttaaactttaataaaaaaggcattaaaagagggaaaaacaactgttaaaagggggggttaaaacacgattaaaatcgtatgccgattaaacccagaagttaacaccatgacgtttaataataatttaaaaactgccgatcgtaaaaccatcagtaaaaaataagaaataaaaaccggttttgttaatgcttaaaacgaatatgattaatattcattgagcgtaaaacaccaacataccatgatggttaaactttaataaaaaagacattaaaagagggaaaaacaactgttaaaaaagggggggttaaaacacaattaaaatcgtatgccgattaaacccagaagttaacaccatgacgtttaataataattaaaaaactgcccatcgtaaaaccatcagtaaaaaataagaaataaaaaccgattttgttaatgcttaaaacgaatatgattaatattcattgagcgtaaaacaccaacataccatgatggttaaactttaataaaaaaggcattaaaagagggaaaaacaactgttaaaaagggggttaaaacacaattaaaaccgtatgccgattaaacccagaagttaacaccatgacgtttaataataatttaaaaactgcccatcgtaaaaccatcagtaaaaaataagaaataaaaaccggtttttttaatgcttaaaacgaatatgattaatattcattgagcgtaaaacaccgacataccatgatggttaaacttagtaaaaaagggcattaaaagagggaaaaacaactgttaaaagggggggttaaaacacgattaaaatcgtatgccgattaaacccataagttaacaccatgacgtttaataataatttaaaaactgccgatcataaaactatcagcgataaataagaaataaaaactgactttatcaatgcttacatacctcgaaaaaagacaaatgaaaatatgaataggtttatccgtttaccagaaaatatatctccaaaaagaagccgtctttaataacgttttcaaccggagaataaatccccctaaaccagttaaataatcgatgtaacaaaatccgcaaataaataatttaaccaaataataactcagttactttcggggttattagtcaacaaaaagaaccggatattgtcatatccagttatttttaattattggcgactatcattcgcttgttgaagcaataccctgctttccctcataaaacgaggtgcataatcaccaaaccattcactaacatcttcaaaactgctgacaaaagcccgtttgtcctggctttccaatatctctaacgcttgtccaaaactttgatgataacggcgtataagatcaatattctctggtgatgacataataatatccgcgtagagctggggatcttgcgcaaataagcgcccgaccatgatcaattccaaacggtaaataggtgaagatattgataacagttgttgtaaatccgccccttcctgtgcgagatgttgcccataagcaaatgtcgtgaaatggcgcaacgcctgaataaagctcatgtttttatcatgctgttcagggctcatttgatgcaagcaagccccccaaattaacaactgttctaaaaaccattgataagcttcctcttgacgtccgtcacagtaaacaacaacttgttttaccaaactaccgacatccggcccaaacataggatgtaatcccaacactggacctttatgcacatcaagcatagcctgtaatggctgctgtttaacggacgctaagtccaccaaaatgcaatggtcaggtaatggcggtaaacggcgaataacttcttctgtcaaatgaataggtacactgataatcaccatccccactcccgccagaatttgttccgcgttaggccaatcttgtggttccagatttctgacttcataaccagacaaagttaacaaacggccaaatagtttccccattttgcccaagccaccaacaatgactatcggccccaattgagggcaaagcgttttaaaccctttgttattctcactggtataagactcccgcataatgcggcgcagaatatcctcaattaaatccggtggaacaccaaactcttcggcctcctgccgacgtgaagcaagcatcgccatttctctgtcaggtgcataaattgacagcccattctgactttttacctcaccaatctctgcaaccaattccagacgctttgccagcaagcccagcaaagctttatccacttcatcaatcttatcccgcaattgagataattcagccgccatatttattatcccgcttttttcaatactgccattctttgcgacaattgcatgctaatttgctgatgtaattttcttagaactgcttctgtcgtctgccaactaatacacgcgtcagtgactgatacaccatatttcatttcactacgcggttgctcagaagattggttaccttcattaatatggctctccaacataatgccagtaatagattgattacctgaaatgatctgatccgcaacagaatctacaaccaaactttggcgacgaaaatccttattagagttaccatgactacaatcaatcatcaaggatggcaataatccagcctgcatcatttgctgttcacattccattacatgttgaacactgtaattaggggtcttaccaccacgcaagataatatgtccattcgggtttccttgcgtttgtaataaacacacctgccccgactggtttattcccacaaaacgatgtggcatagcggctgcacacatcgcattaattgccgtgttcaagctaccgtcagtcccatttttgaaaccaaccggcatagataaacctgaagccatttcccggtgtgtctgggattctgtggttctcgcaccaattgcagaccaactgaataaatcccccaaatattgtgggctattcggatctaaagcttctgttgcaagaggcaatcccattttcactaaactaagtagtaagcggcgggcaatatgcaggccagcttccacatcaaatgaaccatccatgtatggatcattaataagacctttccaacccactgttgttcgaggcttttcaaaatagacacgcatgacaatgtacaagctatcactcaattcagcagaaagagcggccaaacggtgagcataatccagcgccgcatccacgtcatgaatagagcaaggaccacacactaccagcaaacggggatcacggcgctgaataatatccgcaattgttttacgtgcatttgcaataacatgcagatcatcatcactcagtgggtattgttgctttaattcttttggggtgataagaatttgctcaccactgatgtgaacgttattaagtgcatctctttgcatgaacatgtcgattttctcctcaaattatcattctgtactcatttgtttttatgcatttgaccaataacatatcacgcgtcgtaaagaatacaatccaaaagtgtaaacaaatccaaaacactgtaaattattgtttacaaaaaataaaaaaagagtcaatttagtgataaatctattctataactaattaataagattaaaattatttcatatagaaaaatattataaatggttatcttaaaataaaatcaatatcaaaacacaagagagaaatattttaggcaatattttatgattattaaccctttatttcccatttaaaatcatcaggtaaaaatatatttacctcattttcattactaaaaatagataatatcaataatcttattttatatttcacataaagttactgaatagtgcccataaaatattatgaaaattatattgtgatgaaaaaatttatatcactcttttaaatttaatacactagggccggaaaatccggcctctttattaaaatacctgttacacagattaaagtaattgttacaaagcttgctgtaaaaaagcaattaattcctgattaactttatagggttgctccaatgtagaaatatgccctgcatcctggataataatatgatcacagtgcaatatttcagccatcaaataaccctccagaggcgggcgaggcgtatcttgttcaccagtaataacaagtgacggaatatctaatttttccaacaaatgagttctatcttcacgcccaaatattattctacctaacggaacaatactattgcgcaatatttccgcaggaatggcgaccagacgctgagttaattcatcaaccaaatgctgagccggttgctggctaaagaaggctggcactatctgctgttgcaaaatagattgaggaattgcaccaacctgctctatcgcatccaacatggcaacgtattttgtataagtcacttcaggttctaatccgacaaaggtatccatcaaaaccagtgctttaactctgtccggtgccatatcgaccaactcaattccccacataccaccagcagataagccaatgatagcgaattcttcaatgccaagttgatccatcaacgccaggtaatcccgagctaaatcagccaaagtgctatgttgttccggtaactcttccgagtttccatgcccccagagatcaggagcaatcacccggtattgtttacttaacgcctcgatctgaggtgcccacatagtagaatcaaacaaatagctatgtcccaataataacgggaaaccttcaccttcatctcggtaagccatttttttgttatgtatttgaaaagttttcaaagcaaatccttatagtcagttaatcacgtctgaaattattctatacccgtcatctttcaagttgcttctttgttggctgcactcactcaccccggtcacatagttatctatgctcccggggattcgttcccttgccgccgcgatgcatcttgaaatccatagggtataagactctcaaaataattgtctttaagattattacgatctgataataatgtattgccgaataatttatcgatgagtaaatatccttcttcataaaaggcaacattgatttcgttcctgaagagcgtaataaaaaaccctcccaaaacccacccgcattcaacctgattcttcactacagtcattaaaaatatagcagagccaaaaccaaattgatgaccacgcccgcaaaatacagtttaaattgacaaaacgcagttttaaattgagcgtaaaaaaagaggccagcacaattgctgacctctttaatgataactttcggatgtaacgaaagcgtattatttactgttcagacgctctttaatacgagcagctttaccagaacgctcacgcagatagtacaatttagctctacgaacagcaccacgacgtttaacgttaatgctgtctacgactggggagtgagtctggaatacacgctcaacaccttcgccgttagaaactttgcgaacagtgaatgcagagtgcagaccgcggttacggatagcgataaccacgccctcgaatgcctgcagacgtttcttagcaccttctacgacccataccttaacttccacggaatcacccggacggaatgaaggtacgtcttgcttcatctgctcttgttctagttgtttaataatgttgctcataataattctcttaccctaggtaaactgatatatcagagacattcccttcggggatatgtctggattaattagttgcttcagttagatgttcccgttggaactctgttagcaatatcctttgctcgtcagtcagagctaggttttccagaagttcaggtcttctaagccaggtccggccaagcgattgtttcatccgccagcgattaatttcagcatgatttccagacagcaatacgggtggaacttccataccatctaatacctccgggcgagtatagtgcggacaatccagcaatccatcagcaaaagagtcctcctccgctgatgcctgatgccccagaacgcccggaatgaaccgagaaactgagtcaatcatcgtcattgcagggatttcaccaccgctgagcacgtaatcaccgatagaccactcttcgtcaatctcggtttggatcacccgctcatctatcccttcatagcggccacaaatcaaaatcagtttttcatttgttgccagctcacaaaccccttgttggttgagtttgcgcccctgaggtgaaagataaatcacttttgcaccttcgcctgccgcagtttttgctgcatgaatggcttcccgtaaaggctgaaccatcatcaacatgcctggaccaccgccataaggccgatcgtcaacggtacgatgccggtcataggtaaaatcccgtggattccagcattcaatacttaacaggccatttttcactgcccggccagttaccccataatcggttattgcgcggaacatttcaggaaacaggctaataaccccaatccacattatcgcgtcccactcatttcaaccgcttataaccggagtttaaaaaccaggatcccaatctacttcaatagttttagtagcgagatcgactttcttgataacctgcccatcaagaaacggaattagccgttccttgacaccgaatgcatctttcaggtttgctttaactaccattacgtcgttagaaccggtttccatcatgtcattgacagtccccaagttataacctgcggtgctgattacctggcagcctattaagtctttccagtagtaatcacccgtatccagctctggcagttgttctgaatctacaataatttcgcaattagtcagtgaattcgcagcatccagatcatcaatacctttaattttgatgatcatatcctgattgtggtgtttccaggcttccagttcgatgtgttgccaccgacccgctcgttgaataaaccacggttgatacgcaaaaatgtcttcggcatgttcggtggaagaaaaaactctgagccaaccacgaataccatacgttgaacccagttttcccaatacaattgggtttacaggaagttcaatacaggtttgcttgctcatagttaccaccgcgacagattaagctacttttttggcgtctttgatcagtgtagaaacacgatcagacacagttgcacccagaccaatccaatgttcaatacggtccagatctaaacgtaatgcttctgctttccctgttgcaatagggttgaagaagccaacacgctcgataaagcgaccatcacgcgggctgcggctatcggtcacgactacttggtaaaacggacgctttttggcgccgccacgagctaaacgaattgttaccataacatcctcattagttaacaaaacaaccagacttcatcgaggaacgaagtccggttgtcagataaaaagcccgaaaagtttactcactttggcgcaaaaagcaatccaaagtggatattcttcgagactttatcgattaacggcccataaatccgggtggcatcatgcctttcataccacgcatcatttttgccagaccgccttttttcatctttttcatcatgcgctgcatttcatcgaattgtttaagcaagcggttaacatcctgaacctgagtgcccgaaccactggcaatacgacgtttacgagaacctttgattatttctggtttttgtcgctctttacgcgtcatggaattgataatcgcttccattttcaccagaattttatcatccatctgggatttcactgcatctggcacttgagacatccccggcattttgcttaacatgctggccattccccccatgttacgcatctgctttagctgatctagaaaatcatttaaatcgaagccgtcacctttttttaatttagaagccaatttttcggcctgagtgcgatcgactttactttcaatctcttcaatcagggagagaacatcacccattccaaggatgcgagaggcaatacgatccggatggaatggctccagtgcatccgttttttcaccaacacccagaaatttaatcggcttaccggtaatatgacggatggatagcgcagcaccgccacgggcatcaccatcgactttcgttaacacgacacccgtcagtggcaatgcttcattgaaagctttcgcggtattagccgcatcctgccccgtcattgcatcaacaacaaatagggtttctactggattgatggctttatgaacctgcttgatttcatccatcatagcttcgtcaacatgcagacgacccgccgtatccaccaaaagcacatcatagaatttcaatttggcgtgctgtaccgcttgagtcacgatatcaacgggtttttcctgagcatcagaagggtagaaatcaataccaactgcctgcgccaaggtttcaagctgtttgatagccgctggacgatagacgtcagcagataccaccaaaacttttttcttctgttttcctttcagaaagctgcctagcttggcaacgctggtcgttttacctgcaccttgtagacctgccattaatacgacagcaggcggctgagtagaaagattcagttcactgttaacttcacccatcgccttaacgagttcattctgaacaattttgacaaactcttggccgggagtcaggcttttattaacctcgtggcctaccgcgctctctttaacacatgaaataaaatcacgcactacaggcaatgcgacgtcagcttcaagtaaagccatgcgaacttcacgcagtgtctctttaatattatcttcggtcagtcgcccacggccactgatattgcgcaatgtgcgcgatagtctgtcggttaaattatcaaacattgtctctgctcaatttttaaaaatgggctacctgtaaggcgtattccgcaaattataacacgatggaaagggatctctgcacagagattcacatcgatgattaacaacggttggaggctatccttgctggcggtatacttaagctttaattcaacctaagactatcgctaaaacgactaatgctatgccagtattttctataatttcttcattcgcttatttattcagcctggtactgattattcccggcttgctgcggaaaccgaaaggataccgcaggctggcactactttccgcgattgtcgctttaatttgccatgcgattgcacttaaacaccagatattccacgtcagcagcgggcaaaacctcactcttctaaacctaggttctattgtcagtttactgacttgtatcataatgacaattgttgcttctcacggccgtgcctggttcctgctacccattgtttacagtttttccatgataaatttggtcttagcgagtcttatgcccggtgaatttatcacccatctggagaccagctttgaattatctatccatattgggttggcacttcttggttatgcaactttacttatcgctgcattatatgcattacagcttgggtggttggatcatcagcttaaaaataaaaagctcacttttacgccagatatgcctcccttaatgttcattgaacgcaaaatgtttcatatcacccagcttggcgtaatattgctaacgctgacgctctgcaccggcatcctctatatggataatattttcagtagcgaaaacatccataaagcaattttgtctattatcgcatggtttgtttacattgttttactatggggccactaccatgatggatggcgcggtaaacgcgttatctggtttaatctgatcggcgcatttaccctgacactcgcctatttcggtaatcgattattacaggaaatcatggtttactagcagtatgatgttcaatcaatacttggaaggaattctgctttggagcatgtctcaacaagcacattactgattattttaatcatcatggtcattgtctcagcttatttctccgcttccgagacaggtatgatgacaatgaatcgttatcgcttacgtcatctggcaaagcaagggaatcactctgcccgcagagttgaagcattacttcgtcatcctgagcagctcatcagcctgattcttatcggtaacaatctggttaatattcttgcctcagcactcgcgactattattggtatgcgtctttatggcgatgccggagttgctatcgcaaccggtattctgacctttattgtgctgatattttctgaagttatgccaaaaacgatagccgccctctatcctgaaaaagtcgcttttccgagtagttttttgctccgcccgttacagaaaatcatgctgccgttagtctgggtgctaaataaaattactttattgttaatgcgttgccttggtatcaaacaacctactggctccagtcacgcaatgagtaaagatgaacttcgcactattgtgcatgaatcaaatgccaagctatcacagcaacatcaggatatgctgatttcaattttagatctggaaaaagtcacaatcggcgacattatggttccccgtaatgaaattgttggcattgatattaatgatgactggaaatccatcattcggcaattaactcattctcctcatggccggatcgtgctttaccgtgattcacttgatgatgccattggtatgcttcgtgtgcgtgaagcttaccgattgatgacagaaaaaaaagagttcaccaaaagaaacctgatcaaagcagcagataaaatctactatgtccccgtcagcacgccacttaatatccagttagtgaatttccaacgtaataaggagaaggccgggctcatcgttgatgaatatggtgatattcaaggtctggtcactgttgaagatatcctcgaagagattgtcggtgattttacaacatcaatgtctccttctctggcagaagaagtttcaccacaaagcgatgggactattttggttgacgggacagccaatatccgcgaattaaataaagccttcaactgggcattgcctgttgatggaccacgaacggttaatggtatggtgcttgaagagttgggagaaatacccgcacttaatgtacaagtgcaaatcggcaaatataattttgaagtactttcagtgaacgataatgtcattaaacaagttcgcgtcactcccatcagcctattttctgatcaaaaagcacaagtcatttaaatcgctgcggaaaattgacaccgttggaggcgcgcacctccaacggcaaattcctgttaataatctcaggaacccgaaatattatcactactatggaactacactttcaattcggtcagtttttcttctggcaatgctaactcatcattcttattaacgaggacgtctgaatcaagaatatgatgtgcaatatcctgagcctctgtcagtgaatgcatgtgataagtaccgcattgataaatatttagttccgggatctggctctgatctttcactttcaagacatcagccatagccgctttccatgcgtctgcaacacgtacttctgccggttcgccaatcaagctcatataaaaacctgttcgacatcccattggcgatatatcaataatttcaacgccctcaccattgaggtgattgcgcataaaaccagcaaacaaatgttcaagtgtatgaatacccttttcaggcataacctgtttattgggtatgcagaaacgtaagtcgaaaactgtgatggtgtcgccatgaggcgttttcatagtcttagcaactcttacggctggcgcattcattcgagtatggtcaacagtaaaactatccagtaaaggcatttcttcatctccacaaaaaattcagatttttcttcaagcaaatgaaactttttcatctgccaccggtcataaagaatgaaacacgcgtcactattatccctattctctagaaaaccctctttggccacttttacttgtggtcattttcttttctagcatcctgtctgttgtttcagatactcatcaaaactcatcgtatcctcacgttccaacgcgtcttgtcgctctacagaggccctgcgttctatagcaaactgttcgtcgctaataacctcatatttttcactgatcagttgctgatggtattcatctgctagttccagtccaaagccaccaatgccctgactcttcattttttccagcacgcgagctgataaagtcagtgatgaatcatcaaacgtagcaattaattcttcgcaaaccttttgatactgcgtgccagaacaactatccaatattgcagcaacccgtttcaagtcactaaataactttttgccaacttttgctaacggctcttccacacttccacaaccaagaccaatcatttgcccaggtttacgcccttcaaggatcactctattccagttcttacggcaacaatctaattcatcactgcccatttccggcgcttcggcaagcacacaccatattaagaataggtcaagaaaacgaatttgtgtttcattgacaccaatcgcggcaaatggattaatatctaatgaacgaacttcgatatattccactcccccacgcaacaaagcgtcagaaggcgattcattccctctagtgacacgcttaggtcggattggcgcatacaactcattttcaatttgtaagacgttggtattgagctgaatatgtttatcaccttgcttagtgcccaatttagcaaactcgtcagatggcttgtgaatcgcttttttcagcccgtcaatataggtatgtaagttattaaacgtaatattcagatcgctctgtgatttattggtgtaccccaagttactcattcttagtgaagtcgcataaggcagataacaagttccatcttctgtccgttcaaaaagaaaagaagtctctcttccacgtaagaacgaggaacaaattgccggagaagcaccaaacaagtatgggatcacccatccaaagcgataatagttacggatcaaacggaaatagccattagagatctgttctttaccactctctgcatcttcaacaccaacccaagcacgccaaaactcaattggcaatgaaaaattataatgaaccccggatatggtctgcatcaacgcgccataacgatttttcaacccttcgcggtataaagtcttatagcgaccaacattcgatgcaccatattgagccagagtaatgttctcttccgcatcaataaagcatggcatacttaatggccacattttttctttgtccagcacacgcgccgtgtgacgatgaatatcgctaagaaaagaaatcgtatattttatatcatcaccagctggtgttatgaattccaacaatgactcagcaaagtcagtagtaatccatttatgcgtaagcgctgcaccaagtgttttaggatgttctgttatggctaaactaccatctgaagtaatacgtaatgtttcacgttcaacaccgcgacgaattccctttaaaattgtcggatgcgcctctagccatgataaagcccttgatacgtccgggatcaattcgacctcccgtagtgttttagaagaatttttataaggggttactttatcttaaacaagccaaattgtcgctgattagatatatacccgtcatctttcaaattgcctctttattggctgcactcactcaccccgatcacatagttatctatgctcctggggattcgctcctttgccgtcgcgatgcatcttgaaatccattgggtatggcagcgaaaatatgtcagcgtcatacagagaacgaggaatgggttggttatggcaacacaaaccactaaaaaagaaaaagccctgctgtttaagcagggcttgatatggcgcatccagaaggattcgaacctccgaccgctcggttcgtagccgagtactctatccagctgagctatggatgcatgttcagttttttactctggtaaaaggcagtagttgcttcgattacctgaatggtacctcggatggtttcatctcaaggttaaattggcgcatccagaaggattcgaacctccgaccgctcggttcgtagccgagtactctatccagctgagctatggatgcgtgttcagtttttcactctggtaaaaggcagtagttgcttcgattacctaaatggcacctcagatgacttcatctcaaggttaaatatggcgcatccagaaggattcgaacctccgaccgctcggttcgtagccgagtactctatccagctgagctatggatgcgtggtttaaatggcggtgagagagggattcgaaccctcgatgcagcttttgaccgcatactcccttagcaggggagcgccttcagcctctcggccatctcaccgtacgctttctttcgaatcgcgactcagaacttttgtttaagctcctcgtcactgcgtggcgcacatattactttcccagacttataagtcaaacaatttttctaaacctgtgtttgtttgaacacttcacacacaagatgtgtagtttgacaccaaaaagtgtactttgtcagcagcaaactattacaccttcaattaaagaaagtgcatgcaaatcattattcgccacaataacatgataggaatactctgttcttacgatagaaaaacaaaaaagagaggaaaatagacaagaagttaagaaactagcaagacaaaaaataccaacagaggtgagatccctcaaaaatggcgcccggttctgacagagataggacgccaacttagagtcaataagttgttggctgagatttttcggcctgaatccgctgataaatttcttcacggtgaacagaaacttctttaggagcatttacaccaatacgaacttggttacctttaacccctagtactgtaactgttacctcatcgcctatcatgagcgtttcaccaactcgacgagtcagaataagcattctttgctccttgaaaatttaaaagagtcgggtctttcggtttccccgctattatccatcaaacaccgtgaaaacgtaaaacaatggtatatgcttaaagtataagcaattttaagcgcatttcctacctatatagtttagccaaaataaataaatatgcgctcaaccttttaacaatttcacaacaagatttcaaggcaccataaaaacaacgctatggtgccctctaaactcaggtaataccgcttatagccgcgatgctacccactcttccacgctatccaaagcagaaggcaacgcttcaatatcagaaccacctgcttgggccatatcagagcgaccaccgcctttaccaccgatttgctgagctacagaagaaattaactcacctgctcttattttagcagtcagatcctttgtgacaccaacaattaagctgactttatcatcacttatagtggaaagcacaataattgctgaacctagttgatttttaagatcatcaaccatcgttctcaacatcttaggctctgtattgcttaactgactgaccagcaacttcacacccttcacttctttcgctttacttgctaaagaagagctctcttgtgcagcctgttgatctttaagctgttgaagctctttttccaacgctttggctctatccagcgtcatccgtactttttcactcaagctatggatatcacttttcactaattgagcaatatcttgaagtaaatcaacctgttgatgtacagattccaccgcttttttacctgtaattgcttcgatcctacggatacccgcagccgttccagattcagcaataatacgaaacaagccaatatcaccagtacgatttgcatgagttcctccacataattcagtggaaaaatcccccattgatagtacacgaacttgctcttcgtatttttcaccaaacagtgccatcgcacctttgacttttgctgtctccagatccatcaattcagtaacaacaggtgaattttgacgaacttcggcattaaccaaatcctcaaccagacggatctgttctggtttcatcgcttcaaagtgagaaaaatcaaagcgaaggtatttatcgttaaccagagagcctttctgtgatacgtgctcacccaaaatttgacgtaacgcagcatgtaacagatgggttgctgagtgattcaaacgaattgcatcacgacgttcaatatcaataaccgcattgatgttatggtttacacttaaggtacctttctcaagcttaccaatatgaccaatagcctgaccatatttttgtgtatcaataacacaaaaagcacaattggtattactcagaatacccgagtcaccaacttgtccaccagattcagcataaaaagcggtcttatccagtataacaatcgcttcttcgcccgcctgaatttgattgactgattcaccatcacggaagatagcagtcactgttgcctgctgttcgttatgatcgtaaccagagaaatcgctgcgttcatcaactttgatcaattcattataatcggtaccgaaaccacttgattcacgggctcgacgacgctgattttccattgccactgcaaatcccgcttcatcaacgctaatattacgctcacggcaaacatcagcggttaaatccacagggaaaccataggtatcatacaaacggaaagccgtttcgccatccagaatatcaccggacagttttgcgagttcatcgtctaataattgaagaccacgttccagcgtacgagcaaactgctcttcttctgttttcaagatctgctcaacaactgcttgctggcgtttaagctcttctcccgccgcgcccatcacttctagcaatggcgcaaccagtttatagaagaaggtatctttagcccccaacatgttaccgtgacggatagctcggcggataatacgacgcagaacataaccacggttttcattagaaggaacaacaccatcacaaatcaaaaatgcacatgaacgaatgtgatcagcaataacccgcagagatttattactcagatcatctgtagcaccagtgacattagcaacaactgtaatcaaatcacggaacagatcaatctcataattagaattgacgtgctgcaatacagcagtgatacgctccagccccatccccgtatctacggatggttttggcaacggctccatcgtgccatcggcatgacgattgaactgcataaagacgatattccagatttcaatatatctgtcaccatcttcctccgggcttcctggcggcccaccccagatatgctcaccatgatcataaaaaatttcagtgcaagggccacaaggaccggtatcacccatttgccagaagttatccgatgcataaggtgcacctttgttatcaccaatgcggataattctttctgctggtattccgacgtcgttcttccaaatatcataggcttcatcatctgtctgatagacagtcacccataatttttctttaggcaaattaaaccaatctttgccagtcagaagttcccaagcataactaatagcatcatgtttgaaatagtcaccaaaactaaaattacctagcatctcaaagaaagtatgatgacgtgcggtgtaacctacattttctaaatcattatgtttaccaccagcacgaacacagcgctgagcagttgttgctcgggagtaagatcttttgtcctgtccaagaaagacatccttaaactggttcatccctgcgttggtaaacagcagtgttgggtcattatttggcaccaaagaactacttggtacgacttgatgccctttagtatgaaaaaagtcgagaaacgcttgacggatctcagcagtgcttttgctcataattgtcccaaaatcaagctggaaaaaacagatttatgaattggttaggtgggatattccatcacctattttcaactcacgaataaacaaagtggggataagataaaagctcttctattagaagtatacccgtcatctttccaagttgcctctttgttggccttgccgtcgcgaagcatcttgaaatccatagggtataaaatcccaaatacatccattcgctggcagcattgtaaatcgtctggatattttctgaaagcatgatcgcataatatggataatactcgctttctgagagaggaaaccgcgtcattattaacgcggtattagtttgatgacaaaacttttacagctttgaatacaagaatagagattaccgatattattagattagaattcttcgttattcatctcttcattttcattgtcttcataatcagaagcagcactattgaattcgccggcattgtgcaacagcatttcacgtaattttttatccagctcagtagcaacttcaggatgctctttcagatagatggtagcattcgctttgccttgaccaattttatcgccattatagctgtaccatgcgcctgctttttccaccagtttatgcttcacacctaaatcgattaattcaccataagtgttaatgccttcaccatacataatctggaattctgcttgcttaaatggcgctgccactttgttttttaccaccttaacacgggtctcgctaccaacgacctcttcaccatttttcacagaaccaatgcggcgaatatccagacgaacagaagcatagaatttcagcgcgttaccaccggtggtagtttcagggttaccaaacatgacaccaattttcatacgaatctggttgataaagatcaacaacgtattagaacttttcaagttaccggccagtttacgcattgcctgactcatcattcgagcggccagccccatatgagaatcaccaatttctccttctatttcggcttttggcgttaaagcggcaacggagtctacgataatgacatcaacagcgccggagcgagtcaacgcatcacagatctcaagagcctgttcccccgtatcgggttgagaacacaacaagttatcaatatcaacacccaacttcttagcatagatgggatcaagagcgtgttcagcatcaataaacgcacaggttttaccttcacgttgtgccgcagcaataacctgtaatgtcagcgttgtcttacccgaagattccgggccatagatttcaacaatacgccccatcggcagaccaccagcacctaatgcaatatccagtgataatgaacccgtggagatagtttcaacgtccattgaacggtcttcgcccaaacgcatgatggaacctttaccaaactgtttttcaatttggccgagtgccgctgctagtgctttttgtttattttcatcaatagccatttttactccctcgtaagcaatgaaagggctctctcactgccgatgaataatttttaatactgaaatgttgcctacaattatactgtataatcatacagcatcaagttaattttttatacccgttatctttcaagttgcctctttgaagcatcttgaaatccaataaggtatataatctctgataacagtgttttcagagaataaatgacagcttgaaggcgtacttcatttcgatcaccgttaaaacaacaacggcgggacacaacttctaccccatttaccgttagataggcaaacccaaaccacactgtgccaacaggtttttcttcgctgccaccatcaggcccggcaatgccactaaccgaaaccgccagatctgcctgtgcggctttcagtgctcctgtcgccatttctctcacaacctgttcactgacagccccatattgctgtaaaacggcctctgacacaccgagcatctgatgcttagctttattactgtatgtcacaaagcttcggtcaaaataagcagagctaccggcaatatctgaaattgttttcgccaaccagccaccggtgcaagattcggcacaggtcaccgacagtgtttgctgtctcagtttctctcctagctcaatactaagctgagtcagaattttttcactcataacactctctttatccgataaaagatcaatttctttgaaaccggttccaaatccacaaactcgtgattgtcaacgccaacagagtaccaaagcctatccctgttgtaacaaccgggacgcctattttaataaccaatgagtagaggccaagcatcaataacatggcgatattctcacccaaattctgtactgcgattgcataaccgaccccaatcgtttgcctgccgctttcctgcaataatgcattcagcgggacaataaacaaaccgccaaaaataccgagaatgattaataagacgtaggaagcccaaatactgtgctggacagcgaaaatgaccaccatcacgccgattaaaacaccggcaggcatacaacggtgaactgttttaagggtgataaaacgggcagcagcacccgcaccgataataatgccgacagcaaccatcacattaagtattgtcggcgtgctattgtcagaaattcccagaacaacaggtacccataagaccaataggaatctcagtgttatacccgctccccagaacaaactcgtaccaattaaagaaaatcgagcgcctttgttatgccaaagaatgcaacaagctgaagcaaagtctgtcagcatctttttcagattccagcccttatcccgacgcaccgccgataatcgggggataaagaaattagcgacaacagcaataccgtacatcaacgcacaaaccagcagtgcgattgccaagttccaatcagacaaaaaaccaccaacgacagagcccgtaagaatggcaattattgttgaagcctccatcaaaccattcgcctttactaaacgatcaccatcggtcagttcaaccaaaatgccatatttagccggtgaatatgatgctgctcccacgcccaccaaggcataacccagaaatggatcatatcccaggcaaatagtaaacgcgcccaacaacttgaagctattagcaaacaacatcacacgatctttcgggaaacgatcggcaatttgccccacaaaaggtgccaataggatatatgccaagacaaacactatctgtaatattggctggctccagtcaggataaaactgggctttcaactgtgccaagatcgcaaacaacagtgcattatcggcaaaagccgaaaaaaactgcgacaccaatacggctttcatgccacgggtcaatagcggttgaacaacggaggatgcattcacaatatattgttcctattcagcttccgctattttacacaaagtaacaaaatcggctttaccaccgtcaagttctccctgtttagcaaaacgtttcccccgaccgagaatagtacagaatccctgttcatcaattgaaacaatgtcaccagtatcgagccaatcaaactgaatattcccatgttcatcttttaccgctggtggttccaaatgatttggatcttccattctcagatatcctttcatcatattcgggccacgtagctgcaaacgtcccccctgcttaattcctgctatcggaatcaaacggaattccattgccggcaaaatccgcccaaccgtaccgaccttagccatcatcggcacattcaatgcaatgacaggcgcacattctgtcatgccatatccttctaaaatgcgaataccgaatttgtcttgccaaatctgtttagtattttcagcgagcttttcaataccggctataacacaacgaagacgtgcaaaatcatacggatgagcagaataggcataattctccaggaaactggatgtacccaataatacggtacagttacattcatataccagttctggtactacccgataatgcaatggatttgggtagaggaatattcggctaccagacaacaatggagtgaataagccaacagtcaacccaaatgcatgaaatagcggtagagaagacataaaacggtcaagtggattgaaatcagtaatggtttttatctgttccacattggctaacaaactagcgtgactgtgaacgacaccttttgatacagcatctgaaccggacgtaaatagcaccaaagcatcatcatcgggtttttgtgccaccatcgcttgcttcggaaaaaagaggtgccacaagatccataatttatccagcaaagtcactgtactttccaaatcctcaagataaacccagttaacctcggtaacctgctcggataaatgtgttaatcgctcctttttcagaaattgccgggaagtcacgatagttttaatactggcaaccgctagcgcattcttcaatccatgactgtcggttgtatagtttagtaaagccggtattcttcctctcaaagatgccccgaatatcgcagctaccataatagtggcattaggtaaaagaaaaccaatccgttccccctggcaggtaaaacgctgcaaaatacgactggccgccagtacttttttaagcagactgttataactgtcttctttaaaagaaacatcttcaatacagggcttaaaacgaccaaattgttttcgtgcaaccagtaaagattcaaatattgtttcttgcggtcgggtcgccattcgggcattcatcattatttcatgcaaacgctcaccggctaaacgacgtcgttgctccgaactagacgcattcggcatcagcaattgtgtcgcaggcaggattttcattgtcaccttcggaaaaaggtgaagtttgaaaataccctttaatcggctgaatagggttctttctaacccttcaaaacgaacaggaaccacaacggcttcagatatcgccgcaataaaagctgccccatcatagattttcatcaaagaaccagtcacagtaattcttccctcaggaaaaacaactattggccgccctttttctatttccttaaccagtatcctgacagccattggatttattgggtctaagggaactatttcaacatagcgacttaccagtttcataaagccacgatttgcaatgttggaatagacagcaaatactggcttaaccggcaaaaaaagtgttagcaaaacaccatcaagaaaagagacatgattaggcgtgataaggcattttgggtggttaaattgtttaatatctccttctactgttaaacgaaacatcaaacgaaaaacaagccttagaaatttaaacaacatattcgtatctcaacccatttgaaaaaataaatagaagatactatttattattcgacactgtaatattcttatttctctataaaaaataccaaaatagtgtcaggaaactattccagagaacataatctctttcacataagttgtaattttttccggtgaaaggtgcgcattaataatatggttcgcacattcacaatagagattttctctggcggcaagcacttcttccatttcttcaacaatagattttcccgtcaaactaggacgttgggtactttctggttgctgcattaatcgctcagccaaaatgctcgctgaagcttgaagataaatcaccgtgccattttgtcgcatatattggcgattttcagcggaaagaatgatacctcctccagtagaaataacgcgattaatttgagtaacttgttgtaaagcttggctttctaattgccgaaattgttgccatccttgctggttaacaatatccgcaatggtcatattactggtttgttggatatggtgatcagtgtcaataaatgtgtacgataattcattggctaataattttccaaccgtcgtttttcctgccccacgtgcacctacaataaacaatatttggttcactgcctgatatccttgataaatttcatcgttaaaaatatattaacgcctatagtaaccagaaatttacatcaacgtaaaattaaaagttaatatatacggtaaaaaccaccccaaaagcatgaccttaccgaaacttcaatataatcaggctcgcttctggggtaacaatatacccgttatctttcaagttgcctctttgttggccgcgctcactcaccccggtcacatagttatctatgctcccggggattcgctcccttgccgtcgcgatgcatcttgaaatccatagggtatagcacattacttacggactaaatcctctccataaccaatccatttatacgtagtcaacgcatctaatcccattggaccacgagaatgcagcttttgcgtgctaacagcaacttccgctcccaagccaaactggccaccatcagtaaagcgagtgctagcattcacataaaccgcagcagaatcaacctgacgaacaaaatagtcagcattgtgcaaagattgagtcaaaatagcatcagaatgggacgtaccataggtacgaatatgatcaattgcctgctccatatcactgacaatttccacattcatatccagagataaccactcatcacggtaatctgcttctgtaacatccacgaccttagcagctccatctttcaaaaacaccattgctgatttactcgcatgcagagtaacgccttgctcttccatgtacttgctcagtgcaggcagaaaatcagccgcaatcttctgatgtaccagcaatgtttccaaagcattacaggcacttgggcgttgcactttagcgttagtgatgacagttaatgccttatcaaaatcagcactttcatcgacaaaggtatgacagacgccaattccgccggtaatcactggaatggtcgattgctcacggcacaacttatgcaaccctgcaccaccacgtggaatcaacatatccacatagcgatccaatttcagtagctgaataactaactcacggtccggtttatctatcgcctgcacggcggcggccggtaatccactctgttcaagtgcctgctgaatgactttcactgtcgcttgattagtgttgtgagtctctttacccccacgcaaaataaccgcattaccggttttcaaacacagagatgcaacatcgatggtgacattagggcgtgcttcataaatcaccccgaccacacccagcggtacacggcgacgctccaacctcaagccactgtcaagcaaactgccatcaatgacttcccctaccgggtcagataaaccgcatacctgacgaacatcgtgagctatcgcggtcaaacgttccggcgtcaataatagacgatccaacaatgcttcgctcatgccctgttcacgggcctgaatcatatcaagctgattagcttcaagaatgattgcactttcctgctccagtaaatctgcaatgcgaattaatgcctgatttttctgttttgtacttagctgtgccagttgccatgcagcttccctggcagcctttcccatttgttctaacattatgaatccttaactcacgatcatgtcatcacgatgaaccgcaacagcaccatattcataaccgaggatttggcttatctgttgtgaatggtggcctgcaattaaacgtagagcatcactgttataacggcaaacaccatgcgccaaatctttaccagacagactacgaatacagataacctctccacgggagaaatcacctttaatatttttaatccctttcggtaataaagagctgcctttttcgcagattgctgtttcagcgccatgatctacaataatttcacccgccggaggtgcgccaaaaatccaacgcttgcgattttccatcgggctttccaacccatgaaaacgagtacctaccggattaccttcaatgacatcagagatgacatcgggtttattacccgcggcaataatgacatcaatccccgcgcgaccagcaatccccgccgcctgaagtttagttgccatgcctcccgtccctaaacccgaaatgctatcaccggcaaccatacgtaattcatcgctgatgtcataaacttccgggataagttttgcgtctggattgttacgcggatcagcggtatacagcccttcaatatccgtcagcaatagcaatttatcggcgccccccagaattgccgctagtgcagataaattatcattatcacccacttttatttccgccgtcgcaaccgcatcattctcattaatgacaggcacaatgcgattatcaagcaaagcctgtaaagtatctctggcatttaaaaaacgttcgcgatcttctaaatccgcccgggtcaataacatttgcccaacatggataccataaatagaaaaaaactgctcccataactgaatcaaccgactttggccgaccgccgccagcaattgcttggatgcaattgttgcaggtagatccggatagcccaaatgttccctccctgccgcaatagcaccggaagtcacaataataatgcgatgacctttttcatgttgctgagcacattgccttaccagttctacaatatgagctcgattcaggcgacgagagccgcctgtcagtacactcgtccccagtttcacaaccaatgtttggctgctattcatcatatttttgccattaaatttaaattaaaaaaacagtgctcagttttaacaggagagaagcgttatgccaacaggcatcataatgctaaattgaaaaatataggcgcttagaacaaatcaacattgttcacttcacccgaaagcgcatgaaatctttataaaataaagcagttaataatcaacaagtaacgtaaatttcatcaacagactttatttctcaaccattgactaatctcccgtaacgccttattgaaactgttataaacaggtgttgtcggaatagccagtaattgactatccattgatgacattgctatcagcttagattcctctttcgggctgaaaatatcattctgccaataacccgctaacataggaacggaacaacgccgacctaacaaaccttgttttttaagggagtaacaaccgagttcgagacgaaacgccttttcatccacattataaatacccagtctgctagcaaacatatcaagatacatcgaaggtgaattttgttgacgttcaacactgctgagccactcatgaacgatagcgccaagagtcgcaacgcccttaatacgtttagattccaaataggccaaccggacggcaatattggcaccaaagcgaaaaccaaatagaccaatcctggtgtggtcaatccagggaatttcatccagttgatggatgatttgttgatggagaatacaggtatcctgtgtcatcctcagacgtgaagagtaaccaatcgagggcatatccacagttaacatcgcaaatccaagtggtgccagataatcacggaacagccgataataatcgctttgcaaattatccaaactgccacaaaccaaaatagttggagaaggtctttgcagttgctgaggcagatgaaggaaaccggtcacacaacccccttccttgagtttgaactctattttcctcaactgatagccagaacaacgagccgcattttcataagctttattggctaaaatgacagcctgctgagacaactcatcccccttaagatggggataaccagcgatgctatacaaattagccgctttcaaccagaaattgctcgcttctgggatctgctctgcctgcaacgctctctgttgccacaacatcgcctgatgtgaccactcaaaaacccagttacctttacgatacccaatcacagtatccagtaaattatcatcactgcgctgtgcgtttgtcatggcaatccggcacaacacttcttctatttcaaacggatcaatttctcgccaaatccacatcagccggttaatcatacgataccagctaccatgactattaccatctaacgtactgtaattacccgcaattaaccgaggatcgcggtgctttaccaacgtggaagtttcctgatgtttttgtcttggcttaaaaagtgattctgaaaggttccgatttgccataactaatgctgattttatctaccttcacaaatgggtggaacgaatactacacccatatcccaaggttgctcgatccaagtatcttgaggaatatcaacaatataatcatcaaccaacggttggcctgccggctttgcaaaaatagtcacaaaatgggctttgggatatatttcacggatggcctgagcagtgcctccagtatcaaccagatcatccacaacgatgaaaccttcaccatcgccttctgcttttttcagaactttcagctcacgttgattattatggtcatagctggaaatacagactgtatctacatgacgaatacccaattcacgcgccaaaagcgccccagggacaagaccaccgcgactcacggcaatgatgcctttccactgttcgacaggaagtaaacgttgtgccaatttacgggcatgtatttgcaacatatcccaagttacgacatatttttcgctcataagaattgatcccgacaacttaaaaatactttagaaaagcatctcgcaaaaaaagttgcgcgaattatagtgacttaggtctgtaaaaactagcggaaacagggaatcaatgaatcgtattattcttaacaaaagtaaagtggtattctgagcccaataacatcatggcgttaagcgctcatcatatagaaacttaattgagatgcagtcataggagattcgtcgtgtcagaactatcacaattatcccctcaacctctatgggacatctttgccaaaatctgctctattcctcacccttcttaccatgaagaagcgctggcaacccacattgttcaatgggcgcaagaaaaagagttgcacgttgaacgtgatcaagtcggcaatattctgatcagaaagccagccagtaaagggttggaaaatcgtaaagcggttgttttgcaagcacatcttgatatggtgccgcaaaaaaacaacgatacagtgcacgatttcactaaagatccgatcagcccttatgttgatggtgaatgggttactgcccaaggtacaacactgggggccgataatggtattggcctggcatcagcattggcggtactggctgatgacaatgtaaaacatggcccgctagaagttttattgaccatgacggaagaagccggaatggatggcgcttttggcctgcaaccgggctggcttcaagctgatatcttgatcaataccgattcagaagaagaaggggaaatctacatgggttgtgctggaggtatcgattttaccaccactttagcattgacccgtgaagctgtgccggctcactataaaacactaaaactggtcattaaaggtctaaaaggcgggcattccggttgtgatattcatttaggactgggtaatgccaacaaactattggctcgcttccttgtcgcccatactcaggaattggggctaaaactgctcgacttccaaggcggtacgctgcgtaatgccattcctcgtgaaggccatgttattgttgctattcctgccgataaagcagcacagcttacccaactgaaagataactacttggatatactgaaaaatgagtatgccatcgttgagaaaaacctgactgtattactggaagaggttgaaaccgatattcaggcattaactgatgattgccaaaaccgttttatctcactgctaaacagtacccccaatggtgttatccgtatgagtgatgtcatcaaaggtgtagtagaaacctcgctaaacgtgggcgttgttgcaatggaacaagataaagtgaatatcatttgcttaatccgttcgcttatcgacagcggcaagtcctatatcatcggtatgctctcttcgctcgctaaactgtcaaatgccgagatttccgctaaaggtgattaccccggctggcagccagatgcaagttctcctgtaatgcacttagtaagtgaaacttatcaacagttattcgataagacacctaatattatggtaatccatgcagggctggaatgtggcctattcaagaaaccttatcctgatatggatatggtatctatcgggccaaccattacgggcgctcactctcctgacgaacaagtgcacatcaaaagtgtcgggcaatattggcaactgctgactgcaattttgaaagccattcctgaaaaggcttaatcagttctcccctgccctatgtgatggcaggggaattaccattcaagcaagagttgccgctcaatttctgggtcctgcaacgtcacgtgcaaaccaaccaaacgaacgccacgcccttcccggcgagatgtccatgttttctgggccaattgcagtaaatcctgcttatccaataatggatgaacatgctcctgagtggtgagttgaaaatcatcaaatttcagtttaatcccctgacgggcaatccgcagatcaggtttaacgttactcaaccgtttttctaattccagatataaactttctatcagttcagtgcactgttcccattgatgaatatctctcgcaagtgtccgctccacaccaattgattttcgcaaacgatctggattcaccaaccgttcatcaataccgtgacaacgatcccaaagtacctgaccaaatttccccaactgtttcaccaaaacaatgacgtcatatttttgtacatcagaacaggtttccagccccatattagccagccgttgcaccatgactttgccaacccccggaatttttcgcaaaggtaaaaccttaataaaatcagccactcgatcaggaggaatgacatactgcccattcggtttattaatatcagaagcgatttttgccaaaaatttcaccggtgcaataccggctgatgccgtcaattgtaattcatcaaaaatggattgacggatctcctgtgcgataagcgtggcagatccataacaatgatggctatcagtaacattcaaataagcttcatccaatgacagaggctctatccactcagtataacgagacaatatctgatggatatgccgggaaacctccctatacagtgccatacgccccggaagaactttaagctgagggcagagtttcagcgccattgcagtagacattgcactacgtactccaaaacgacgggcaggataattagcggtactaataacacctcgcctgtctgcattgccgcccacagcaatgggaatatgacgaagtgacggatcatcacgcatttcaatcgctgcgtagaaacagtccatatcaatatgaataatctttcgcattctgctttagcctatcaacaacaactgtataaacatacataaaaatagactcaagagcaatctagtaacaatatcggctagtaacaccatcagagcgacggttaaaagacacttttagctcaaatttgaaaatatcttgaccaataaaataattaattaataccgttattaacttttccctgcccgattccttgcgttaagtgacctatcctgtaagtgcaacttttctatttaacgacattccaaggatactaataacaatgaaaaatagcgggaaaccacaaaaaacctcagctacagcgactacacagccaattaatcgcactcttcattatgctttatcaagcataattatgctgagtacgggcctgccaggttatctggctgcacaggaaaatagagagcaaaaatcaaaagaaaaaccggaaaaatcagagaaagtcattacactttctacactttctgttattggtggattgaataacagcgtcagtgccggaagctcggtattgaaaaaagaggatattgaacgtacccaggcagataatattgccgaactgcttgatcaacttcccggcgtttccatgtcaggatcgcctcgtccaggcggccaaactctgaatatctggggaatgggtgataccgaagacgttaaagtcaccttagatgatgcaccgaaaggcttcgagaaatatctccaaggctctatctttattgaacccgaattaatcaagcgagtcgatgtcgataaaggcccacataatctacttgatggtaatggcggatttggcggaacggttaaagttgtgaccaaagatgccagtgatttattacggcccggagaagattttggcggattgctgaaatacagttatcacaccaatgatcgccaaaatatttatagcagcgcagtctatggccgaacaatagagggctttgctgacggtctgctatatatgagcaaacgagatggcggcaatattaaacgaccggatggcacccgttttgcgttctctaaaagtgatcaggcatcctatttactgaaaacgaatttttacctgaacgatgctaatacattgacactttccgctatccgctctgattctgatggctggcagccgtgggcagcaaaacgtgatgagatagctgttccgtcagaagccgacattgaaaaatatggttggaatgaagcctggcgccggaagttagtttatcgtgatcaaacagaccaaaattacacagctaaatggaatattgcaccagaagacaatccgttacttaacctgacagcaacctatgcctattcgaaaacagaacagcatgataaacgctctgaaaaagcccacagcggttttcttggttcattaggaaatgaaagctggatcgactatgtagataacttagcagatataaataacaaaagtgcttttataaccggaccaatagagcacacattattagttggagttcgttggcataaaaatcaacggaatacccttatccatgataaaagtaaagacaaaaaacctgaatataattatggctattttcagccaacctatatgccttcaggcgagcaaaaaacgaatagtttctatttgcaggatgcaatggttatcggcgatgttactttgacacccggtgttcgctatgaccatatcaccaatattggcaaacccaatatcgcggcaatctacaataataattcaccaaatatagggcacgattaccgcagtgttacttatactggctggtctcctcattttggtatcatgtggaaagcaacacaaaacctgtcactattttcagatatcagccggacatggcgcgctccgttggtggatgaacagtatgaaatgcaatatgcccgggcaagtgttactgccaccagccgtaacttggatgtagaaagaataacgggtttacgcttcggtgcgattctgaatttcaataacctactggcagaccaagataatttgcaaatccgtacaactttattccgtaatagaggcaaggatgaaatatttacccgtcgcggaatagtatgtaaatcaccggattgcggaaaacctttatccaactaccgtaatttaccgggatataccattcaaggattggaaatcgagactttctacgacagcaattccttgttcggcaaactttcttattcgactatccgtggtcagagagatgcttcacctcgcgatccttggggtaataaaacctggattgcggaaattccacccacctccgcccgcgccatgttaggggtaaaaatccctcaatggcagatggcaataggctggaccggagattttatccgtaaacaggacagatcgccgaaagatggagatcccatggcaacactctggtcaatacccaaaagcaaaggttatgcactgcatggcgtattcgccagttggcaacccaatttctggcaaggtcttgaagcacgtgtcacggtaaataacttgtttaatcgtgattatcgcccatacctcggtgaatcggtttccggggttggacgtaacattaaattcagtatttcccagaagttttgatttctcacctgatagttccctctatttgagggaactcagactgctgaccattcaactctccaagtttctttctcaccctgacgttgaaatatcgcaactgattgctcttctgaaaaatcacacttatttagctgaattaattattatttttatttaataatcataattaccttgattgataaattagtcatttctttattaaagaaggtatattgtcgtcagaatggacacctgttaaattaagactcttgttattttatcgtatggttcatcttatttagtttttttgcgtcacatgatttaattatccttttaacaaacttatttattttggccattcgagtaaagcaatttgttcctagtgttttagcgatgcaactgggtaaaaaaatactgggacatggatttgataaatatttgaacgccccgagcataggacggattggaatggcattttatgaagcagaaaatgagccacctcgtgtagctgattattttgaaagtgtgtttaaaaacatcaatgatttgcggcaacgctgttcaccttatccgctgtcattctggagttaatatgttgtataactattggggggaatttctaggactggcggtgattcattttctggcagtagtagcaccggggccagatttcgcggttaccatacgacaaagtgtgaggtttggtcgctgggctgggatgtgtacggcagtgggtatcggagcgggaatatcagtacatgtcatctatacactagtgggggttagtgcattaatgcataccactccgtggttaatggaattagcaaaacttgttggcggaacttacatcatatggctcggtatcaaatttatcaggagtaagcctaccgatttggctgtcttagagaatgagggaattgttcaagcttcacagagtagatggaaagcatttctgatggggtttatgacaaacgcccttaatcctaaggcgacgttgttctttttggccgttttcacgactgtggtgagtagcaatacacctatcctgatacaaatgttttatggggtttggatgtgtgtggtcaatgcggtatggtttgtattggtcagtgttattttttctaatacattgattcgtaataaatttatacggaaagggtattggttcgagcgggtgatgggactggtgctgatcggatttgctgttcggttattatttatgtctgtttgaatttctccaaaatagggattggcaacgaacgtctcaatactgatatacaacttgttcggtaatagacgaaatgattactgtcatcagcatgaaaacgtataaaaagatatataccctatggatttcaagatgcatcgcgacggcaaaggagtgaatccccaggagcatagcaagctatgtaactggggtgagcgagtgcagccaacaaagaagcaacttgaaagataacgggtatatttagttagcccagtcattttgctaccttattaatcaatttaaaacccatccttcctaatgttttctcgttcaatgtcggtatgatgttgaattttctacccgctttgaaaaaacctaatcacagccttttacctttaatgattaaagttttatctgttttttcatgacacacttgcactttttctcgattttaaaaacccttccggttgcagcaaaatgccataagggaattcacttaaagccaacagcttgacagacgatgatcatatgaaaataataatcattttcatttataaaaattgttggaaatcataataccaacaccaaagacatgcctaaaattaatagttctgcgcaacaattttactttgaacatcatgactggttatataactggctacgccgtaaagtcccttgcccttgccatgcggaggatctcacgcaggatactttcctgaacgttctatcaaattcaaatttgtcagacatccgccagccacggtcttttctagcaaccgtggcccgttgcctggttgccaactattaccgtcgaaaaaagaacgaggagagctatttggaatatataaactcgacaccagaaatgaccatgccctctgctgaaagcagaatcgctacatttgaacagcttgaaaaacttgagatcactcttgataaattgccagttcaagtaaaaagcgcttttttactggcacagctacaaggactacgttatagcgaaatagctgatcaacttcaggtttcttccagctcagtaaaacagtatttgcaacgagcacataacaaatgtaaaaaaattcaaattctcacttaaaattcaaaaaaccgtgttacattcaaaattgatttcatgaagaaatcattaataaagttgattattttaacttagttataattggatattatggagaaaacgatgcgacacggaattaccgctgcaatcctactttgttgctctgccagcactttcgcaacaccaccacaaattatcgctcatcgtgccggtacaggtgatgcacctgaaaatactgagtacgcaatttctaactccttagagaataaagcagatgctatttggatcactgtccagctttcaaaggatggtattcccgtactctatcgtccaacagacctaaatagcttgaccaataaaagtggactcgtttctgcttataaagcaagtcagttggctaaatttgatgctggttacaaatttggctctgatggtcatcatccattccgtaataaagggttaggtattccaacattagaacaagtcttaaaaaaatacccagatacttttttctatattgatctgaaatcaccggatgcggatccagcacaacaagccaaagcactagaaaaagtactgaccaaacaaaaatcgcttgcccgtacccgtttctattccactaacgaaacttaccttaacgcattacccgcaacaattcagcgttttgaaagccgggataaaacccgcaccatgctggcaaatatcacaatggctcatcaatgtgatatccctgcaaataccgacaccactcgctggtatggtttggaaatgcgccgtaacgtagaagttgttgagaaatatactcttggtgaggcacgttccaaatcagtattatcatgggataaggaagcgatggcgtgtttccgtgctaatggtggcgctaacatcattctctttggcattaaaactgaggaagatttcaaacaagctaaagagcttggtgccgatggtgtactggtggattctcccaagctgttcagtacctttaaaacaaaataagaatttgaggttcccagaaagaaactcccccagtaactatttttaaggaacgctttaccccatacagacaaaatcttatatagacaaaacaaggcagaacccgcagttttttgcgggtttttccattggtaaataaggcgcattttccaaactcaagatgagatttttaataatcaactcctaatttctttaagcgtgagatcaatgtcgttgggttcattcccaacaattttgctgcgccatcatcaccaaaaattttacctttgcattgtttaacggcaagagagaaatttttaatttccaagtccttcagttgctgcatggtcagcacaacttcaatgtgttgaagtttattgtgaatattctgatgcgtcgtttcattttgctgttgatcttgttctagcaaatatttaaacgaaaccgtgccttgtttcgctataatgagtgcgcgttcaatgacattttgtaattcacgaatattaccaggccaatcatattgctgtaattctaaaatatgcctttgtgaaaatgggagataattaattttacgcttgtcacaaatcaacttagtaaaatgcgtaactaaaagtggaatatcttctttacggtcacgtaaagccggtgaataaatcgggaatacatttaaacggaaatagaggtcttcacgaaaacgtttgtgtttaacttcttcttttaaattgcggttggtggcggcaataatccgcacatccacatgtcgcgttttttcttcgccgactcgctcaaaggttccttcctgcaatacacgcagcaatttactttgtagctcgataggaatttcaccaatttcatctaaaaacagtgtgccttggtctgccaattcaaaacgtccggcacggtcacgcacagccccggtaaatgcacctttaacatgtccgaaaaattcactttcaaacagttccgaaggaatggcggcacaattgactcgaataagtggttgctgtttacggtgactggattggtgaatagcacgagcaatcagctccttgcctgtacctgattcaccataaatcatcacattggcatcggttggagcgaccaccttgattttctcaataatctgtaaaatggatgcacttctgccaataatttcatcatattgattttcatgtaaaatttcttcttgcagatattcattttgctgttccagtcgactttttaaatcttgtagttcttcaagggcatgggtcagttgtttttcggtattcagccgatcggtaatatcacggaacaccactaccgcgccaataatttcactgtcacgaatcactggggtactggtaaattccaccggaaagcaactaccgtcacgacgccaaaaaatttcctgcaccccttcgtgcacaataccgtcatgtaccgccgcgtaaatcgggcactcttcttcaggatagggttcgccattttcatgggtatggtgatgaacgttatggatattgtcactcaatacatcttcaggttgcagccccaacattttagccccgacagggttaataaaggtacacaagccttgtttgttaatactgtaaataccgtcaccgactgaactcagtaataaatgcttgcctgtgtcagagtcaataaacagctcttgtaaggcttgcgattcttttaaacctatacgaatggctttatcggcatttttattgagttggcgcaatgctaaatctttgacatccaccagcgaccatatcagcaaggttttatttttataagacaatgaaacagcagtaatatccaattggattttttcaccgtttctatcaaagatatacaactcattgttccaggcccgaccttttaccaaagcttcttcggtaaatgccataagatatggcagttgtctgaaatgaccaaaaatggaagtcaccgttttttgaataatttcatgacgttcatattgtaataattgggtggcgctaatattcacatcaataaactggttttgatgtggatctagcacaattaatgcctgtgacgtgtgttcaaataccagcgggcgaatcgagtcttcgtaaactacccagtccgagataaagtcagttactatacctgtcatctttcaagttgcctcttaaaatccatagggtatatgaaatttcataatttaagcgattaaatttcataatactacgaaaaatcctaattccctagtcgttcaatttatctccatggaaactatttttataaaaattaaatgatatttttcaatgtgataaaaattaacttccactccaaaatacaacttggcacagttctcgcaataatttctcgcaatagtacagacagactacatgttggttcattcccaaataacattgaacgaggagttggtcatgccaaagattgatatcgagcaatataaagacggcgattttcttgttgattacgaagaaaaagtgtttgaggacgtcaaagccctgccaggtgaaaaagcattggtgactttccataccgttgcatttgaaggatcagccggcttggtcaatgtgttacaggcaaaacgtctgttgcgcaaaggctttgaaaccaaaattttgctttacggcccaggcgtgcagttgggtgtacaacggggttttccaactttaggggcagaagcttttccaggtcatttagccgtcaacaatcagttgaaagcctttatggaagaaggtggcgaagtctatgcctgccgttttgcattacaagcattttatggtcaaaccgaaaaagcgcttattccgggaattcggccaattaatccattggatgtgatggatttaagactgctgatgcgtcgcgacaatgccttagtcattgatacctggactgcctaagtaaacataaaccacgaggggataaggttatgaaccgaatcattaaagccgccgcagtacaatgtagcccagtgctttatagtcaagccgcaacagtaaaaaaaatctgtggcattattttagagcttggaaaacagggagtgcaattcgcagtctttcctgaaaccgtcgtgccttattacccttatttctcctttgtacaaccgccatttgctatgggtaaagagcatttaaagctattaaatgaatcggtggttgtaccttccgaagcaactttagcgattggtcaagcctgtcttgaagccaacatggtggtatcgattggcactaatgaacgtgcgggcagtacgatttataacgcgcaactgttatttaatgccgacggttcaatcattcagcatcgccgcaaaattaccccaacttaccatgaacgcatggtgtggggacaaggtgatggcagtggtttacgtgccattaattctgcggtagggcgtattggttcgctggcctgttgggaacattacaacccgttggcacgttttgccttaatggcagatggtgagcaaattcatgccgccatgtttcccggttcattggtagggcaagtctttgccgatcaaatccgcgcaaccattcaacaccatgctttagagtctggctgctttgtgatcaacgccaccgcatggctgcatcccgaacagcaacggcagattatgcaggatactggctgtgatatcggtccaatttcaggcggatgttttgccgccatcgtttctcccgaaggcaagctcctggctgaaccgatcacacaaggtgaaggttattgtattgccgatctggactttagcctgattgataaacgcaaacgcatgatggattcgattggacattacagccgacctgaattactcagcttaatgattgatcgccgtccaacacacgtattacacgaactgaaagtcgaaacatcagttcaaagtcatcccgaaaagctctcaacatttaatgaagaacatgtcgaaaccatattgatgtaaacccaatcgatagggggttaaagatgtctgcaatacaacgattaaccgatttgcaactattaaccgatttacaatgtaatggtctgaaatgggaaggcaattttggcttgtctcgtaaaggtggcgcagggccaagcgatcataaagcgctgagccttgacgggcagaccatgatgattcctgtgctgaaccttgcagtacaagattctccctacaccgccaagcctgaaccgcactctgacaaggtgattgtctttaaaaaccggattcctgtggcgaccttaactgcacctgcacgaccccgtttttatgatttaaaaaccgccgaaggcattgcctaccaacaaattgccaccttacatagccgtgatgtgctggcgacaacggtgttacagcattgcattcgtatgaaggacaaagcaactgcctgccaattttgctcgattgatcagtctttaaaagagggtcgaaccttgatccgtaaacgcccggaacaattggctgaggtcgcgaaagccgccgttgagctggatggcgttaagcaaatggtgatcaccacaggtacgccaaacacaggagatcgtggtgccaagattttatatgactcagttaaagcgattaaggcgcaagtcgatttgccaatacaggtacagtgcgaaccacctgatgattttgcctggttccaacgtttaaaagatgcaggagcggtgtcgattggcatgcaccttgaggcggtaagcgaacgtgtacggcagaaaatgatgccgggtaaagccgaagtctcgttggaaaaatattttgcggcgtttgaggcagccgttgcggtgttcggccgaggacaggtcagtacctacattttggccggtttgggcgataccgaactggaaatcgtggagatgagcgccaaactgactgaaatgggggtgtatccatttgtggtaccgtttgtgccgattcgaggtacaccattagagcatcaccctaaacctgatcaagcttttatgcagtcgctctatccgaaaatcggacaacaactcaaacaacatggtttgaactcggaaaatactcaagccggctgtgccaaatgtggcgcttgctcttcgctaaaagcgtatgaataaggagaatgtgatatgaaactttctcactatccttggctgcttgagccaaatgaagggcggaaacaatttgttagcgatgacattgccatcaaaattgtgtcggaagattgggagcgtcgccaatattatcgtttgcgtgaaatgacctttcgcgatgaacagaaaatcttgcaagaagatcgtgacgaatacgatgttaaagcattaggcattgttgccattgagaaaatgttgggtgcgcatgatcgagtgattggcgcagtacggattttcccggatggcgaacagacatggtatggcgggcgtttatgcgtagaacctttatatcgacgtcgccatatcattggtaaagcgttaatcaataccgcggtatcgaccgccaagcacttaggatgccgtacttttttagccaccgtgcaaagtcaaaatgaacactatttccaaaggttgtgttgggatagtttgcgtcagttaaccattgccaacattccacatgtgctgatgcaggcacagattgaaaactatccattaccgcatgtcccaatgcaagcctatatgcaaaaggagacgcagtgatgaaactcaatcaattactcgaaatgttaaaacatacacctgcaatgcagtccaagcaggcgattgctcacaatgtttcaattgacacaacttgccatatggattcattggatagcttatatgcctatcccggagatgacacggcggcagtgtcgctaaatggtcaatatgtattgcacgcctgtgaaggcatgttaccaagctttgtgaccaatcatccttactttgccggatggtcagcagtcatggcgaatattagtgatattgccgcaatgggtggtcgggcattgtcggtggtgaacagtttttggcataccagtagcgaacatgcccagttgttaatgcaaggtatgcaggatgcttgtcgtgcttatggtgtgctattggtcggtggacataccaatattggggtggtttatcagcctactttatccgttgcgattcaaggcatagcacgaaaactactctcggtgttgcatgtcaaaccacaacaaaaaattctgattgctttaaatctgaaaggacaattccaccccaataccccttattggaaatgctttgagcgagtgtctgaccgcattttacagtcacaaattgccttgttgccgcaattggcggaggcaaatctggttcatgccgcccgcgatattagcaacgccggtatcttaggcagtttattgatgctgctcgaagccacagcatcgggggcacatatcaatttagataccattcctaaacctgagaatgtggactggtttaaatggctccaaatcttccccagttttggttttttactgacggccgatacaaatgaatgtgaagaaattattaagctgtttcaccgtcagggtattgcctgcgcggtgattggtgaaaccaatgccagtggtgtggttgccgtgcagcaacagcagcaatacggaatattttgggattttaaccaccaaatgtttaccggtttttgttatgccgatgcgttaaaaaagttacaggctaaatccgtacagattaaacctaaaagtcagcaggagtcgatgttatgcccagtgtgaattttactgtgaaatggcctaatggggagctgattcaatattactcaccctcaacggtgatttatgaatatctgtccattggtcagcattacccaagtatgcagttcttgcatcaagttgaaaatggtctgcatgccgcatcggaaagggtacgggcacgttatggctttttctgtagttcagccgtggacaatctggcgataatcaaacgccaagccaaattcttcgggttaagtccggaagatcaaattgaaattatcgaaatgacgaatcaatgagagggatattccatgttaagtatccaaaatcaaatgttacagccaaattatgatgtggtgattattggtggcggtcaggctggtctatgtatcagtcactatttgcaaaaagcgggtattgaccatgtggtattggaaaaagaatccgagttgacccatagctggtgccataaacgttggaataatttcactttggtgacaccaaactggcagtgtctattgcctgaacacccttatcaggggaacgaccctgacggctttatgaaaaagcacgaaattgtggcatatcttgacgaatttattgaaaaaactaatcctcccgccattttaaatattcaggtagaacatgtgaaaaaagtggcagcgcatgagtttgtcattgaaaccaatcacggtacaaccacagccaaacagcttgtcgttgcagcaggcgggtatcacaccccgatttatccaaaattaagtgataccttgcctaaccatgtgaaagtgatgcattcggaagagtatttaaatgtagagcaactgcctaaaggtgcggtgctggtggtcgggtcaggacaatccggtgcacagattgccgaagatttacatctggcaggcaaaaaagtctatttatcgacaggcaatgcaccacgttgtgctcgcttctatcgcggcaaagatgtggtgaaatggctgtttgatatggggtattacgaaacgactgtcaaacatcatcgttatagtgaagaggtacgtaacagtactaaccactatgtcacagggcgtgacggcgggcgtgatattgacctgcgtaaatttgccttagaaggtatgcaactgttcggacattttgatgactttaaagagggtcaattctggtttaaaccaaatttatcagaaaacctggaccttgccgatgctacttataatcgtattaatgcctcgattgatgagtatttagagaaaaacaatattgcaaccgatgaacctgcatcggtatatcaaccggtttggcagcctgagcaggaaatcacacacattgatttagcaaaagaaaatatgacttccgtgatttggtgtattggttttaaaccagactattcatggcttgatttagatatttttcaaaccaatggttatcccaaacatgaccgtggtattactatcgatccgaatgtcacatttattggtttgccgtggttatatacatggggttctggacgttttctggggatcgatcaggatgccgcctatgtggtgcaacatattgagcaacaaataagtcagcaaaatatacatatgccacctactctaattaaaggtgctaaatctaaaatcaaagataaaagaatatctcaaatgtgaaattcctaacttcacctgacagaatatttttaaacactcattttgatgaatttttggcttgcttaaatctatccggcgtcactgtaggcaaggagcctgcgcctcgatgagttccgcgcctgatgaaccttaaaaccttgtcggcttgaaagagccattttttatgttaggtttctcatcaggccggtaggccgttcatgtcatcaataatcagtcttcgcaaaaccagtggggtaacatttaaataggttcacaatgacgccagctttaggcgacaaataccgtgtgttgtgtcgtaatggcccacgctatccgggcgagtttattagccaatgcacaggccacgatattagagtgctttcgttcaagctgctgcttaacccagtcagccagttttccctgccggtgttcaatctgttgcatgaatgaccgggcgcagagtaccaacagttgccggagcgtcttattaccccgtttactgatacccaataaggtcgtccttcccccggtgctgtactggcggggaaccaaacccgtcgaggccgcaaaatcccggctgcgagaatattgttttccatcacccagttgtgaggaaagcacactcgccgtgatgggaccaataccggggatcgtcatcagccgttgtccggtatcatcctgaatgatttcctgtgacagtgcggtctcaatctcggtgatttgcccaaccagatagtgataatgcgcctgtaaccgtagtaatatttgcgccaaataaggtggaagaggatgttcggccaaaacagtggagagtcgttttatcacggcaatccccttgggcatactgatgccaaactcaagcaggaaagcttgcatctgattggtggttttgactttatcccggaccagtgattcccggacacgatgcaacgctcgcatggcttgttgggcttccgttctgggctgaacaaaacgcattgaaggtcgtgaggcggcttcacagatggcttccgcgtcaataaaatcattcttgttacttttgacaaaaggacggacaaactgcggtgaaatcagcttagcctcatgccccaaatcagcgatccgccttgccatgaaatgcgcgccagcacaggcttccatcacaaccgttgccggagagcaatcggctaagaattccatcaatttagttcgggtgaattttttacgtagcagagcttttcccgatggctcctgacaatggacatgaaaagaatgtttgccgagatcgatgccaatcagtgcgatagtgttcatgatggtagcctcttatcaaagataatcactctgctaatatactgccgttagagtgaggggaaccatctcattaccttggggcatttatgtggtaaagcagctaaagaagccactttaacgtataagtattcatgggccgataatgggtaatagtccggttgaattgcccactttaccgctaaataactcaagtgccccagacttttttatgctctcccctagttgctgagtataccatttctggtatactgaattcacacaataccagaaaaggtataaacaggatggagcaacaaagtgaaaagctgctagtgtggataggcagcagcaagaaggacttgctgaacttgccgaaggacgtgcagcgcttctttggctttgccctagacttcgcgcagcgtggcgaaaagcatgatgctgtgaaggtgatgaaagggtttggtggtgccggcgttctggaagtgttggaggacgacataggtggtacctaccgagcggtgtatacggtgaaatttgacgaagcggtctttgtgctacatgcctttcagaagaagagtaagcacggcatagcgacgccgaaagaagatatggacatcatccgtaatcgactgaaagtggccgctgtgatggcccaggagatgaaaaatgaaagagaaaaccattaatggcgtagcggttgaaatcagctccggcaacgtgtttgccgatctgggtttccgtgatgccgaaaagcacaaaattaaatccggcttggcctttgagatcatcaaatctatcaagcgtctggggctgacacaaactactgctggcgaacgtattgggatcagccaggcaaaagtatcccacctgttccggggcgatttttccaacctgtcagaacgtaagatgatggagtgtctgaatcggctggggtgtgacatcgagatcactgtcaagccgactactgcccaaaccgggcatttaattttggcacatagcgggtaaggtaaatttgcccatctctgattagcggtgggtaaagaccaaacacattgaaagttatagaacataaaaatctatggttcccctcgtttttgcaacactcattttgatgaatttttggcttgcttaaatctatccggcgtcactgtaggcaaggagcctgcgcctcgatgagttccgcgcctgatgaaccttaaaaccttgtcggcttgaaagagccattttttatgttaggtttctcatcaggccggtaggccgttcatgtcatcaataatcagtcttcgcaaaaccagtggggtaacatttaaataggttcacaatgacgccagctttaggcgacaaataccgtgtgttgtgtcgtaatggcccacgctatccgggcgagtttattagccaatgcacaggccacgatattagagtgctttcgttcaagctgctgcttaacccagtcagccagttttccctgccggtgttcaatctgttgcatgaatgaccgggcgcagagtaccaacagttgccggagcgtcttattaccccgtttactgatacccaataaggtcgtccttcccccggtgctgtactggcggggaaccaaacccgtcgaggccgcaaaatcccggctgcgagaatattgttttccatcacccagttgtgaggaaagcacactcgccgtgatgggaccaataccggggatcgtcatcagccgttgtccggtatcatcctgaatgatttcctgtgacagtgcggtctcaatctcggtgatttgcccaaccagatagtgataatgcgcctgtaaccgtagtaatatttgcgccaaataaggtggaagaggatgttcggccaaaacagtggagagtcgttttatcacggcaatccccttgggcatactgatgccaaactcaagcaggaaagcttgcatctgattggtggttttgactttatcccggaccagtgattcccggacacgatgcaacgctcgcatggcttgttgggcttccgttctgggctgaacaaaacgcattgaaggtcgtgaggcggcttcacagatggcttccgcgtcaataaaatcattcttgttacttttgacaaaaggacggacaaactgcggtgaaatcagcttagcctcatgccccaaatcagcgatccgccttgccatgaaatgcgcgccagcacaggcttccatcacaaccgttgccggagagcaatcggctaagaattccatcaatttagttcgggtgaattttttacgtagcagagcttttcccgatggctcctgacaatggacatgaaaagaatgtttgccgagatcgatgccaatcagtgcgatagtgttcatgatggtagcctcttatcaaagataatcactctgctaatatactgccgttagagtgaggggaaccatctcattaccttggggcatttatgtggtaaagcagctaaagaagccactttaacgtataagtattcatgggccgataatgggtaatagtccggttgaatcgcccactttaccgctaaataactcaagtgccccagacttttttatgctctcatttttacgctctcctgtggaagaacccccaaatttgacgatcaatttaatcgaggatctaaaatatctattactttagctaagacttcatcaacgctccacataagcatccatcacaggctgacgatgatccttattacctgtcaaacttaatgaggttcctgtcataccgtgaaaaccattggtaaaagcaacgactcgacagcgttgggttactttacgtgcaagcttaatcgccgattcaacaacactgctaccagtcggtgaagtaaactgtagtttataggtcaaccctctgggtaccagaatgttttcttgaaaagcggtgataaagtcttttttcgctttagtgtgcaaatccaatgcaccttgaataccatcttcattgatgtactgagatacagccagttttagtgcgtaatggttatgcccataattcaacgcccctgcacaactgagaaaatcaagatatggcgagccatctgtttaagttctcctccaaatgttttctgaatgaggctaatgtaagtcagcctcgtagattagatttctgcgtttacagcaactaaaaactgtgaaatcaaataccaaaaaattaactatccgacgataattaaataatctgctcggatacaaatgctatgtcttctatcttttcactaagtcgttcggccaacgctaaagcgaatcccgtgccataacgtttttcatctgctgtcacatttattaaaataccttcgcctttcaaatcatttatcaactcaaccctaatcggtaagctggtatggtcacgcacatcttcatcactattcaccaacccttgctctaataactcattgcgagaatgaaaatgaacgtagctaaatgcagcctcgaagggtggccctcctaacatggtttgtatttctgaatatggaaagcgtctaaagggcaatatttctttttcagcatcgaaagactgtcttgccagtgcctgccagttattagcagagtcaagattcaactttatcggaatatgattaaggaacagtccaagagttaaatccgcaccttccatctcaggcctaccgttaacagacatccctgcaacaaagtcaatatcttgtaactgatgagctgttgtcagatagaaaccagcaaaaaacatactttttaacggaatgccccaatctgatacattttttaacaattgctccactgttctttccggcaagaccagtactgctttcctataatcagtatcttgatatctatccgttttttctttagctgaatattgactaaaaaactgtttcgccttgtcgttatcgagcgcttctcgctcaagtctgacaaactctgacaatggtgccggttgctccaataaaacagactcgctaactaaattggcttgatacaatctcaaaagctcaaggataaaaacagactcactccaaccatcaaggatcgcatgatgaaaggcataagctaaccgaaattgtccttcattcaatgccgccgcatgtaccctcattaaaggagcctcttcaggatcaaatggttggcttaactcaaccattactttttcgtgacgtgcagccaactgttcatcatcaagatttgtgtagttttccactataagtggcaatgatggtagtgattcaaccaattgcatcacttcactaaaagaggccaaatcaaattttgttctgagaaccgggtgccttttggctattgactgaagcgtgtcgtgaagtattttttcatccagtggcaagttgacatcccgagcaataacatcaaggtagattgctttaccactgtataatccctcaaacagcatccctagctgcaatctcgtcgccggataagcagtttcgatattaacaggcaacctttgcttatccgtttcatttatcagtgggttctcattctgctgactgagagcttcttctgtttgtgccaaaccgcggcaaaccccacgcaatgccggattgcgagttagtccattatctgtttgttctgggagcaccaaatctttacacatcgccctaagcgtcgaggtacgaaataaggtagagagtgtcagattgagtcctcgtttttcagcttccgcgataacctgaatagccaataacgaatcgcctcccaacgcaaaaaaatcagcatcaggcacaacatcaaatggccctagaatttgttgccagatctctgccaccagtgcttctgtcatggagagttcaccggataccacctcttctaatctctcagcctctttccaacccatcaaaaatcgacgatccactttaccactgcttgttaaaggtagctgttcatgctgaataaactgactaggccacatatagctgggtaacaatgtttgaacacgagtgatgatagcttgctcaacatcagtgtttttatgagttgtatgatcaatgtgagttgtataatgggcgaccagttgttcaacatggcgatcactgtcaatgttcagcacaacacaaacagcactcacatcctgacagctttttattgcatgctctacttctgccagctcaactcgatgaccccgcactttgacctgatcatcaagcctgcccacaaactcaatcagtccatcattcgacaatacgccttcatcaccagtagcaaacattctggctcctggttgggtggagaaaggatcaggtaaaaaacgcaggctagttagcccaggttgatataaatacccccgtgcgacagactgtcccccaatatagatttcaccacgctcacctggcctgaccggtcttaacatctcatccaataagtacatttccgcattgacgataggtttacctaagggagattttatcgcatcaatacttaatgatgacatagagtaactactcaccaaggtcgttccttcagtcgggccatatacgttattaaataaaaagtgtttgcctaatttctgcttcctggacaaatacttaaacgcatgagtgactgacattgcatcgccaccaacaagcaattgaggtacgctatccagagcctcttcgcgataatctaccaatacgtgaaataaggcaggtgtcagtagcaatatcgtaattccatgttcaacaaggcatttcggtagctcatcaatggcttgatatgaaggagaagccaataccaatgccgcgccattagtcaatgctccccatatttcaaaggcagaagcatcaaaagccgcaggtgctaactgcaatattttttcattaggtccgaaatgaacgtactgctgtttctggctaacgaagttggtaacgccatgatgagtcactcccactcctttggggcgtcctgtacttcccgaggtatagataacgtaagctagctgttgactggtaacttgtggcaggatttttggcactacagattggatttcatcgatataaacagtggcaacattttcaatgaccgttgaatctttcatcatagttcgagttaacaccaaccttgtacgcgagtccgttatcatataacgaagtcgctcagtcggataatcgggtgggagtgctaaataagcagcaccaactttaagcgcagccaacatcgctatgatcatgtcagaagagcgctcaatatggattccaaccacatcttcagccccgatatctaagtccattagtcgataggcaagttgggtagcacggtcttgcacattttggtatgtcatttctacatgatgtgcactaatggcgatcttgtgaggagcattctcaaccatcgcatcaaattgttcatgcaacactattcgttcatgcaacactatgcgttctttcattatttattcctatgaataatgtgcagcagtcaatttgactggcaagcgatggtaaccagatagaaaagtcgaatagatagggctgggttctccactcaaagagatctgatcaacgagctccacaagcgcctccagcagtgcaataatttctattctggcaagagcggcaccaaggcaaaaatgagccccatatgaaaaagaaatatgccgattatcactccgattcagatcaagctgattgggtttagtaaagacggtttcatcaaagttagcagaccgattccaaacaatgacaatatcaccagccctaatctgctgaccgcctaattcaacatctaccgttgcggtccgaccaccatgtaaagccggcgtggtccatcgcaacaactcctctactgccttactaatttctgcttcaccacgtcgcaattgagcccagcattctggatattcggcaaatgcttttatgatccctatcaatgccaaccgagttgtttcatcgccacccagtaacacgctataacaattgaagacgagttcttcttctgttaatgccagggagttttgagtcattgctatcaggttacttataagatcatcttccaatggcgcgattttgcgagtctgaatacatttatagaaatacatcaacacttcatttctggcgaggcgggtatctactttatcaactgacaaagagttcgaagccagtgctgcacttgcattgacaaatagttttgctcgatccgattctggaacttttaaaatgtcacatatggccgctaacggaatatgtggtgctacatcagtggcaaagtcacattgcccggatgttactgcattacgtacaagctcatgcatcgcatttttgattcttttctgtaccgacatcaggttcttagggctgaaagactttaacaactctttacggatttgacggtgtctatctccatcagacactgcaagcatgcgaccacccgctgtgtctccatcatgtaacagtgtagccatgacatttccacgaacagaggtaaaggtttgactatcacggtaaacccgcatagctaactcatgggtgctgacaacccaaaatcctgattgaccattgaccgcaggatgccaagcgacaggtgactcattacgtaattgccgccagatgttatctatatcaggacgtaaatgagtcagggggtcagtgagatttatgttatccggcactttagctacgtttgaaataagattcatatcgcccccaattcatgcgcatcaagaatttgaacggcttcactgtccataaatcgaacatgaaaacgcaagcactgccccatacgctgataaatatccagaaatgccttatggttatccactttgcccaacaccatgttaatttcattggtttgtgagcctcccggcaaagtagctcctgcccatacatatgggcgatatgacgatacaccctcaagagagagaagttcatcttccccattaattcggagaatttcacatggacgtgttggcgcaatatggcagatattgaaatagacgtgctcaggattgaacacagggagatcaatcatttttcccagcgctaatcgtgcagccatttcaagcagactaatattgaggctgattttggccatctcgttgatacccccgcccactcggccatttacttcaatgatcctgggtccctgctcggtcaacttcagctcggtatgggtgatcccccgattaacccctaacacgttgatggcacttgacgttaatgcatagatttggttttgttcactatcacttaaaactgatggccagatatgaccatattcacgaaaagggggactaagtggcatcttgccggtcacatttatatgcttaatctctccgttaaccaccaagctctcaaccgagacatagtcaccaaaaggcaacgatggccgcccctggaggaactcttccaataccagtgaacgaccaccatcaaatccaacctgtttatttgaaagcagtttttctacaaggctctttcctgtttgcggatcttcaataagataagtatcgatgctgccaccaccataggctggttttaacactgcgggaagacaaacctgttcaacagcttgctcccaatctgacacagtgttaatgaggtagaatcttatcgactcaatgccagcctcttgtaaagccactcgctgcttatatttgtcagtaagccgatagaccgtttcgagattgtgaaaaggcaaattcaagtgttttgccagcgtagctgtaagacgtaaggcacgctcactaaatgtcacaatccccgcaggattaaggtgagcaagttctgataccgcccttgcaatatcagaaccatcaactacgtgaccaaatcgtgaaaagtaggatatgcgctctcttgtgtgttcgtttgaattgataacaagtacaagtggtgcaaccccattcaattcagtgacaatatctttgggaagggctgcgccttcatcataaatcactatcagaggttgattatcaaaggattgtgggccattacgcagagaagccgggcgcatatcggtccaaacttcttcaatccattttttacatgcttcttgcgtcccactaaaaccggtcgctcgccatccggtagcgacaggccattcagaatgaacacaggcatattgctcttcatcatttattacaaccaaatattcatccgtcaaaccttcaaaacgggatgaatacttcatttgtgtttgggtattttcatcactcattagcgcagacttccttcttttaagcaagtttgacggatatacaaataaatgtcgtaaagctgatctcgataatagaagtgatctccagggaacatgactaattggcaagaatcatgtgtcagcgattgccactcttgtaaatgatatgggctcacccacgggtcacgatcaccgccaatggctaaaatagggcaatgtaccttgccactggcttgtttgtgctcagccactaacaaataatcagcacgcaatacaggcaacatgagatcaagcacatccgcatgaagcagtttcttatcttcatttcctatattggtttttagctcttcaatccaagcttcccggctcatacggagtatctcttctggcaccatactattcaaatgtggtggacgtgctgctgataagaccaaatattcaacggttcggttagcttgttctaaaagtaatgccagttcatgacataacaaagcgcccatactatgaccaataagaagaagaggcccctgtgtatgcagcaatacatcttttgccgcggtagccaccaaatctcttatacataaagggagtggttcaatacttcgagaacctcgtcccggatactgaagcaccagcactcgataactatcagtcaacagttgctgaacccagtcggtcatagaataagcactgccgccgccaaaaggcgcaatcacaacagtcattgtcgtctgctgtcgatcgcagtaattccataatcctggcgtcagttgaacacgtttcattccaacgtctctgcggaaactttcaatttaggatcactccaatatgtagctatccaatccaggcattcttgttctgatcccgaaaaacccacattttgccaccctaacggtaatatccgcccttcaggccaaatggagtgcttaccctctttgttacataccaccctgtaattcatgatgtttcgctccgccgtttgatagtcaccacttgatccgcctgagcaagcaggtcaatattttgcgaggctacaatccagatccccgaccactttttaggcagtgctgaccatatggctcgggcggtatcagtatccagagatgaatcgcaatcatcgacgacataaacttcggctgaatgacatagcatacgggccaatgtcaaacgttggcgctggcctcctgataactgtttgacactaccggaccccagcacagtatcaagcccttcaggaagatcagatgaacccggtttcagatatactgccgttaacgcccgctccatagtttcatcactgacagcgtcgttacccagtgccaagttatctcgaacagtaccgccaacaaagccagcaccttgacgggcataagtaactttagggctttgccaccaatcgacgtctccacaaacttctttgttattccaaagcacacttcctgataagtgtcgttccagcgcgagcagaccgcgaagcatacgacttttaccggaacccacttctccattaacgacaatcagttgattgggtgtggctgtaaacgaaataggttgcgtatcgctattgcaacaaagccccctcactgtcagtgatttcaggatgtcatcagcaataggggcttcgctggcaggctgctctgtctgtaacagtggctgaattcgctcgtagcagacatcggcatttttatagttagccaaggcgcgaccgaaaaagaagatctgctcactgacccaaccgatataagtcaaaaacagagccaatttaccaatagtgaaatcgccactgacaattcgggtactgacaataatcaaaacaatagatgtacctagcatcacgatgttacgaaatagccccgacagcagatcagtgaacatttgatgctttgcctgcaccgcccgacgacgttcaaaacttgccgaaagtcgctcaatatgcagatccaactttccaccaaggcgaaggtcacggattcctgccaatatgtcggtgatacgacccgcaatttggccttgatattgacgtttctcctcctgtaatgctccgaccttatgtttgagagctatgcccagccacaaaccaccagccatcggtaaaagcgccaatgtcgtcacaatgtcagtactcagcaacaccacaagtgctatcaacaatagtaccgctcggtagaagaaatccgctgtccaaccgagaaaagaggctacttcatcactgtcattacgaatacggttgagcatatccccttgagaaagacccagatccgcgccagagtggctgcaatttattccctccagaatgcgttgtttaagatatgcgctgaccttaaaaataagggtaaaatcaatctgtaagccaaaaatcagtatcactgagcgtaataccattgagcctaccgccaatgccaatagccaccaaaccgctgagcctacgggatcgataacagcactatcaagaagctggctgatggcaaaaccaacgaccaaaggtaagccgtggatcagcgtccatataaccatgctgatgaagtaaagaaaggaaaatctgcgcactaaactcagtaaagaaggcaacatttttgatgggaaaaagtgggttaaccccgtcatgatataagttccctatgttttgttaacgttttgatccctgcgccatgaaggagttcctcgacacggccttcattcatgataatgacttggtcagcagtggataatgtgtgcaggcgatgggcaacgatgatcacggtacgattagcgctaattttttccagtaatctcatccaactctgctcagtgcgaggatctaatagcgaggtgccttcatcgataatgattaattgtgcgtcttgaagcatggttcttaccccggcaatcatttggacttccccttccgacaatgaacgccccccaacccccaccaaagtatccagcccctctggtaatgtcttcgcccatttatggatctctaactcttcgagcgcgcaccaaattgcatcatctgaaatgctgttatcgaacagagttaaattttcgcgtagtgttgctgaaaagagatacgctttttggcttaacactgccacacgattggcaaattcatcaggatgaatggaagtgacctcaacaccagcaagagtaacccgtccgctatcaggctgagccaacccacacatgagattgagtaatgtgcttttacctgcccccgtgcgcccaacaatgcctactttgcttccagcgtccacactgaagctcacgttatgtaagacttgcttaccctgactttcatagcgaaagtcaacctgatcaaattgaactgacagggggccttcaggtagctgattctctacactgttgtgattgactttctcctcatctcgcaacatcttgactaccagtgataaggtcgccatcaattgttgtacctgatctacctccgaagacatctcttccattggctctctgagtcggtcaacataaagataaatcatggttaacgtaccaatactgatactgttatgaccgagtaattgcagcccaaatccaaaacccaggccaaaactcaaggcaaaaaatagctgggtaatcggccaaaatatgcgtccgctgacataggctttacgttccatttttaataagccagaaagcatcttctgtagttgcaaagcaggccaacggcgtcttcccaatgaatgcaaatcatctttcgcagcaagagcatcgccgataaaaccaaatatgtgggctttctcttcacgggcttttttccatcgcactactgcaaggttagtaagtttcaccagaacataagccacaacgagaactaacacggtaattgcgatacctacttctgggataatagaaaacaaaatcaccaaagtacctaatgctaatgcgatattgcctataattcggaatccggattccgcaatagtttttccaataatgtccgcattcccctcaatcttttcaaggagcttaccctgagcttcactttcaatttgcaggatagaccgattgtgcacaacatgatgaaatagctgacgcctaaacgcatcggcaataccccaacctgcactggtactgcaataactggtaaccagaccagcgataacaccggcaaaagagatgattgcgtatcctaaagccaagaggacaagttcataaacaaaagtacctgcggtcgctttatcaatgtaatgacggatcacaaatggccccgctaaatcacaaaccagtgtgacaactaatgccagaaaggtgccaataatggcttttttcattgtccgggcgctctgccaaagcaacttaaaacctgttaatgggttaggagaattcataccttgcatattcgtttgtattttcatattaatttttatgagttatccgttcattaaattcagataggaccgtttttatttgctcttttggcatgacatcacctgcaaattgagcacgaatttccatctgcccatcattcacactgatgttaaagcaaagcaaataatccatcggtgttacctgaggcttccagtaacccgttccctctgtggtgatatcaataaagatcggattaactttctcctcatcaggtgtattcagaaataaaagctctccttcaaaatccagtcttaattgtggtcgaggaattgcctttaatttttcggtgattttaggattaacagaaagatagcgaagtgcttcaaagccaaaccctcgaacaggtacctcacgtaacaaccgcgccacatcagttgcatgttcatcaaaactgcgtcccatcgaaaagggcaacaggaacggaaaaccacatgtaaaccagccgatagtgcgtcctaaatcaacttcgtcgaataggtcttctcgaccatgtcctcccaactcaacaaggatattgttggcactggaaagaaaatggctttctaaagaccgcgcaagcagagtcagtaatcgggcaagtacgggaagttgactgtgctcagatggttttaaaaactgctgagtctgtacttcatcaaatactgttgtttgctcaaccctattcgcctcaatgccaatagcatccgtacttactaactgctgtgcctgttcataaggttgtgaaagccaataatgaacaccaaacaacgctggatcatcctgcaccaatcggtgtaaacgcctggcccaagcgagatacgaagttgtcggaatatctaattcatgggcttcagctccgccaagcaacgccgctaaatcctctgtaagtaaatcccaggaataaggatcgactaccaagtggtgaactataatcaacaacttgtccggcaaattatgagcagttcgataaagttgtatgcggcagattggcccattcagcagatctaacgacttatgacctatattcgctaactcagtaattttctgcgataagctatttagggctatctgctgcaattcaaattgttcaattgcgatacgggcttgcgggttaattccttgccacctccccaatgtagtaaccataaagctggctcccaaaatagggaatcgggccaatagcgctgctgctgcctgttcaacagtctccaatgacaaagtgcgactcagtgtaaacaacacaccatgattacaatgattttcatttggattatcacgctcaaaaaaggcatgctgagctggtgtcaaaggggccagatcacttaattcattcggtgcatatctgactttggttagtgcactcttccacttggctaacaacacattaattgcagcttcattatgacgggaggggatgtactcaagggtaataatcagtttcccatcaacgatggccgcattgatttcccattccagtggacggtgccccgttgctgcccgccgcattccaatatcttcttctacactgaaaaagccatcattctgctgcttcgtattgaagcgccctaaatagttgaatccaatatttggattctgctccataacataagtttgttgtaaatgggtcttgatatagggactagcttcaaccattgcagtcgcaacttcgactaccgtaaccatagcattgaccggtagcacaaaggggcctattgttgtaaaccaccccacagttcgcattacgtcaatagacttgttttcctcttgcctgccataaccttccaactcaatcaagagttgaccgttaccctgttcaacagcaatggtatttgcaagtcccgtcaaaagaaccgcaggtattcctccgttaggcactaatgccgaaatttcctgaatatattgtgtttctgactcagataacttgacctcagcaaccgaacgtttgccataaaggttacttacatgactattcacctgtaccacatcaattggtgcagttaactggatcggaggaagtatttggggagatattgctgcttgttgctgagaccaatagagatattgcgtgcttttcctcggaaacctcggcatttctttttgaataatagcctgatacgcagtttcaagatcttccagcaagatttgccaggaaacttgatccacaattaagtgatgtaatgtcagcaaaactcgaaaatcatccaacattacaattcgtagtaacggtccttcctcgattgataatgatgcatgagcctcattggcgatggtttcttccgaacaatctgattcagcgaaccaaagtaagttgtcataaggcgagcgcaaggcttgataatgctttcccttctctttgggaaaacaaactcgcaattgttcatggtgctcaactaatgactgtatcgccaaggataatgcttctgcatttaacggctccgttgtactgatcacatgtgactgattccaatggtgctgttcagaaaatcgctgctcgaaaaaccattgttggattgatgtcaatggtgctttttctatacgcggagttgaatttgctgccatttcacctttggtactcgccagttttgcaagtgaagcgatagttggatgttcaagcacatgacgaggacgcaaattgatccccaaagagcccgcctcatgtatcagacggataccaataatggaatccccacccaaagcgaaaaaatcatccgtgatgcccactttggctagcttgaggtatttacaccataaatcacaaagctgttgttccaacttgctgcgtggtgcaacataagaagcagattcaggttgttgttttgccagtgcctttaattgcttacgatcgactttaccattagcattacataacagtgcatcaagaaaataaaacttgctcggcaccatataatccggcaattgctcagccaaaaatttactcaatgatctggcatccacaacggtatcactcgtctgcgtcacgaaagcacttaattgctcaaagccactcatatcaacaagttcaaccgcacacatcgctacatccggatggtttgccagcaccgcttcaatttctccaagttcgacgcggcgaccacgaatcttcacctggttgtcggcccggccaaggcactccaatatgccatcctctcgccaacgaccacgatcacccgtccgatacatacgggcacccgggacaggcagaaatgggtccggcaaaaaagccgccgccgtgaagcgattactgccgatgtatcctcgcccgacattcggcccaccaacgaaaatttcaccaccgaccattggaggaacaagttgaaaatctttatctaatacataaattgtcacgtttggcaaaggcgtacccactggacaatatagcccatcagattgctcttcgacctttccttgagtcacatcatcggtacactcagcgggaccataagcatttagcagtgtcaccattggcatacactgatgccagcgacgtgctagatccgtacttaacacttctccagttgagatcatcccacgtaactgccgctgaacccgcatcttcaatgaaatcgattgttcaaggatatccaggataactgcaatgagcgaaggaactagttcaatatattcaaatttctgctcaataatgtattgaattaactcttgaggatcttttacaacatcatcagagacaatggaaaccgtcgcacctacggtcaatccagtaaacatttgccaaactgagatatcaaacgaaatgggtgctgtttgcggcaatgtcacccctagtttcaattcacagttttggacctgaaataccagtaaattaaggaaagaacgatgttcaattcctacacctttaggaagacctgtcgagcctgaagtaaagattacataagctaattcgcttggtgatggctcagttacctgctgattaagtaactttatctcatcaccatccactaaaaccgggctttgaaaactaagttcactgaatgagaaccaaactatctgcggcatatccacaacatgatctgcaatcaatgccttcgcatgttttagcatgtgctgttgccgggctttcggtaaagttggatcaataggtaagtaagcaccacccgagaagaaaataccggtagcaacagcaataaatcgagcgctgcgtggtgctgaaagcgccacaatatcatcggcactaatgccagcattttttaacttcaatgctaccgataacgccaactgaaatagttcccgataggtaagcgattctgttttatcacggagagctatcgcatgggggttactttccgcttgctccaacactagccgataaaatgattttcctgagctataatcaggttgggaattgaatctggctagcaattttgtttgcatcgcgtcatcgacgatagccatattatttagacagatgtcgagatcgaaaagccccttgtttaacagtgtcgcgatacctgccgctaagtgatgaagcgtctgagtcgcagcaacaattccactcacactcactacaccatcaataagctcgatagctatcccagtttccgtctgagcgcaattaacgacaataggcatgaaatgctccaaaaacggcatcaacagcgccttgtctatcgatccatgattaatagcctcaacagcggccatgcgaacatggcttaaccattcacgaaaagtcacggcaggaggtaccgtcaataagacaggcaaacgcttgccttgttcggtgttaatatgcaacacaacagaggatacgcccccaatacggcgcaacacgatactagtcactgccgccaaaattgcccatgtcagcaattcagagttgcccgctacttgttttagccggtcagtaacggtggggaaaagcggacattgcgcacttaccagagatccctcatggtgaggaaaaatatctgcggttgtggcagcggccttagttaaatcaccaacccgcatcagccagtattcacgatcaatcagcttcatagttgtcatttttttatccacatctagaactgaaaatctggaatatcgctaagaacatcgtcttgaccatcaaacaaggcgaaaagagtggtttcttcgcctaatgtcatcagccgtgtcagtgcctctatataaatattcaaccagcgagaaaccgtgtcttgtgagaaaagggcagcggaatattccaatcgcgcttgaagctcatcaccatattcaatacaggtaagattgagcggatattttgcgccattaggatcgacatccagcaattcgacaacggctccatttccccctaataccctaataggatcaacatcattctgaaaatcaaacatggtgagatgataggaggtatttgccatcagtttctggattcgatcagaaggaaatgcactatgtgaaatcgcgctgagtgatgcctgcctaaccgcattcagcactacgtgaaatggctggtgtggatcaagccgtgcacgcacaatcacggtattaacataacaaccaatggtgttttcatctttcagttgccggttagccaccggcatagcaacacaaatatcatgctgcgcacttatctgccattgtaatgccacccaagttgtcaacattatcatttgtaccgttacgcgagaattcatcgccatctgcctcaacctctcggtaacatccttcgatatcatcacaggtaaattagcaccctggaggttagatgctgtcccgccctcaccatcacaaggcagcagcagaattgggatgtttgccaaatatccataccagaaagcctccagttttcgaccctgttcactttcaagtaaggtatattgctccatcgcgtaatttaaatagtcgttcacaggcggagatatcttgccaccactaagagctgccaataccaatcgccatgaccagccatcaaaaaacaggtgatgaaaattcagcaatagtgcttgacgtactccatcgctaaaattcacttgcaacagttcgaatcgtgtgggaggaataccataaggtgagagcggcgtttcaaccatctgctgtagacgctgagtcagaacgggtatgcccgttgcaatagtgtattttgttaaatcgacttcactatgaaccagtttgacctgcatcggaggatggattaccgggttaacgccttgttcgttgtattccagactacaacgcagcatcaactgttgtaagacaagttcagttagcgttttctccagccaggcaacatccgcctccgcattgataagcagagcagcgggaacattataagcgccagactcaccagcaatttccgttgccgcccaaattgctaattgctgaccagaaagtacatgtttattgttccttgtttctatctccggtgttgtagatacggaggataattgaacactgtctttcaccaattgataaaactcattcagatccaggcaatccaacaaatccatcaatttcagatccgtacctaatacctcgttcagccgaaccacaagctgctcaccattaagtgaattacctccagccgcaaaaaaatcatcatcaagtgttaatttcggctctttcagcacttctctgacctgagtcaacaatatctcttcaacattttctcctgaatttgatatcgaagtgtgcggtacaacatcagaaaccatagcagagttctcaatagtctctggccagcaataggtggcaacaaaaggagcaaatggcagttcaagacgacgatttatcttgcgttcacacccttgctgccaatccagattggtgccattgacaaaccaatctccaagcaatgtcaacagagatctttcactatcgtatgactgataacccaacgtgttaatggctgttgcaagctcaccacaacgactgaatctcaccaagcatagttcagcctgttcttgcaacaaggtttgcaaacgctggtgatcaaatgttgaatcagtgaccggttcatcagcaagacgcaatgcatcaacaaattcaagaccaccatcgacgacctgtgcggccaatttccccacaccgtaggccagtaataagtcaattgtcaccccaaacgctgtcaataccgcgtgatgtcccaacaaccaaataatccagcgctgccgaagcgtccaagttttccctgaacataagttctctgcttgttttattacacgatgaaaagctggaaatgtttctcctcgtttcatcaatagttgaatatctattggagagcattcatcaaaaataagaccaacagataacgaagatgatggtgaagatgaagatagcgagattgaaccgtggttcgtgagttgctgcactaaatgcgaaacagatgaagccacacagctccaacgatatgggaaatgctcccgtcccaacattaatatatcggcaatctcgtcaattgatgcttcggttgaagataacgcattagttatagcacttaggtaagtgctgagatcttgtgtcgtctgtgccgatatcagcaccaatctctcatttatctcgtattttttgtgccttaaagttgagggggcctcttcaacgactaaatgcacattagtaccacttagcccaaacccactgattcccgcgcagtaaggacgctgaccttgacgtggccacggctcacaagaagaagagacacgtatcggcagctcttctgtagatctacacaatggattcaactgttggaagtgagccgtagggaaaatctgaccagtgcggaattgagctataatacgaacaagccccgccaacccagccataccacttaaatgtccaaaattactttttacagaagagatgacacaagactcctgttgcacgtcataagcggcaaatgtatcgactaaaccttgtacttctatcggatcaccaattttagtgcccgtaccatgagcttctatgtaaccaatatcagtagctgtgacccctgcttgatgccatgctgccgtaatcacctcggtttgtgcgatgctgctaggtgcagtgataccattgctacggccaccgtcatgattaatcgcactccctcgtatgacagcatggataacatcatgatcttgatgtgcacgactcaaccgtttaagcagaacaaaaccgcctccttccccaaatccagcaccatcagccattgcatcgaaaggacggcatcgatctgtcattgactcaacccctaacccacttgagttcttactactctgaggcaaggtacctaaaacaagttcacagcctcctaccagagcaaaatcagcctcccctgtcagaatcttgttccgtgcttcgtgaagtgcgaccaaaaatgatgaacatcccgtatctatggcataaactgggccacgcagatcaagcagatacgcaatgcgacccgccgaaaaagcatgcaagctgccgatgaaagcgaacggattggcttttccctgtaccgataacgactgaaaaagatctggatgcggcccgccgtgcgcagcaacaagtactgctgtacgcgcatcagataactctttcagagtgtatcccgcattgacaatcgcttctgtagccagttgaagccctatacgttgtctgggatcgatatattcggcttcacttagtgcaataccaaaataacggtgatcgaacccggtaatttcatcaagccatcccccctctttctcattgcctgtaagaatttgccccgtattagccacccgactttcaggtattgggcgaatgcagtcccgaccgtcagccaaaatatcaatcaattcacgccaatttgagcattgtggtaaccgaaaagagacgccaattatggcgaccgcatcatctgaatatagtgtcgtcacaactgtaccaccttagttttattgggagctgtactctcgccaccgagcactttggctaaggactcaatggatggatatttaaatagttgggcaacagtgagatttggaaaatgacgacgtaatcgcccaaaaaccactaacgacttgaatgagtcacctcccgactccaggaatttagcctgcatatcaatatcatcacgcttaagcacttcacgccaaatatctaagataagcttttctatgtcattacaaggaacggtaacatcagaagaaatcgattcaacagtattaacagaagcctgcaaacgcgctatatcaagctttccattagcattaacaaggatttcatcaatgttgtagattctggatggaatatgactggccggtaatcgggtagctaagtttgaaagtagttcattctctctcgcagtacccacaacataagcaaccagttcatcaatctggtgaaactcagattttacactggtaacaacaacctgcttaatcccaggttcagcaagcaaggcattctcaatctctttaggctggattcgatatccacggattttgagctggcgatccacgcgcccgataaataaatagttgccttgctcgttttgtttaaccaaatcaccactggcataaaacctacgtccaaagatatcaacaaagtgagtttctgtcagatcttgatccccatgatagcctctggccagcgcacgccctcctatatataattgccccacttccccgggggaaactggtcgcctggcgtcgtccaatacagctatttcaacaccatttaagggcttaccgattggaattgagtcattgcctaggcgtgttccatttagctgatgcattaatacaccaatagtcgtttccgaagggccatagtgattaaatattctcagattggggtttgctgcaaataaagttttagcaagtgccgaagttagttcttccccaccaataataagtactttttcaggtaataattccgaaaggttaccttctctggataacatctctaattgcgaaggcgtgcatttcaacatttcaattgaaaatttactgatatgcttagcaagcgcgattgagtccagcatcatttctcgattgataagctcaagagtacgacctgttagcagagcaacgaaaatagacgtattaccaagatccgaagcaaaagttgttgtactcgccaaactggagggtattggtgatacacgctcaacaaatgccgagacgtaattcatgatactgctgtgttcaattgcaacaagtttgggaattcctgttgaaccggaagttgataccaaataagccaaatcaccggctttgcgacctgataccggaatatattcctgtggatctaatatttgtctatcaagattaatgtaagaatggtgttcaatacgtcggcagttcaaatcatcagttaatactgtaaccccgcctgcacgctctattaattcattaattctactgtcgggttcgctgacctctaactgaatatatgcagcgccaacggcccagatagccaatgcagctacaagacttgtagcagatctttccataaaaattgccacaacatcaccatttaccactccttgtgaaatgagtaattgagcaatggcaccagccttccctgccaattctttataagtaagtgcaatgttgtcatggcgtacagcatataatgaatctgaagtggttactgaattggcaaaaagatctgcacaagttcttgattctgtcaaagtgtcccatgtttgcatctcatgtcctcatttggcaggaaaaaattgcaatgcattggtgaagccatgatcacatagactttgcgtgctccactaaacggttccctgccatgggcaacagcaaggttgtcaacaaccgccacatcaccgttcttccaatccgggtacactgtctccgcatcaatagcggctcgaatttcaattaatgtggatgcgctgataagagtaccgtcgccatatttcgccattcgtggaaatatccccacaccgagtgcagcttccaaagcaagctgaacttcttcaggcaaactggaaggatggaacagattcgcttgattaaaccagctttcttccccagtgtaaggatgagtcacaacaccttgtacaacctgtcgtgtgattaactgctcttcatctaaccactcaaagtcaacaccttcagatctgagtttctcttcaactattctcctttcctcagtctgaaatacttgctgccaagttaagtcaaacccagtgttataacgtcgttcatataaaacacctttacttttaaattcttcacgggtttcattcgagagacgttggagcacttttctatagtctgccaatgttgtctgaccaccagaatcagcagctttttgtgaccacagccataaatattttggccaagtacgccggtaagacatttcattatgcaaaggtattcgttgatcagcagggtactctgtagaagtgaacacccgatcattgactttagtacgtggtgttgatggttcttcataatccaatatttcaggagttgcacttaatactgcttctctgaatgcaataacatcttcaatgttgaatccacgaaaaagtaaggcaccatgatcattaagcttttttttacactcgttccagttattactaaaccaggaatacagtgtgatctcactatttggagagcaaatcgtgtaaggtagcatatcatattaatcctatttaaaatggattagctaaactgcctacgtcattcattttccaaagttattaattgagtaaattaccaaaactaaaaagagcagcacgaattcgaaatatctggcactatttcgatactcttaaaatagatttaaaccgtatatccaagtaacttggatatgtatacccgttatctttcaagttgcctctttgttggctgcactcactcaccccggtcacatcgttatctatgctcccggggattcgctcccttgctgtcgcgatgcatctcgaaatccatagggtataggttttagaatttgtaaacggttagtaatcccaaatgctagtgaacgctaacactctggtaaaattacatttagtaaatcgatctattgctattatgaatatcttattacataaatcagaaagactcaatactcccacataattgagatgaataaaattgccgtttgtctcaaatgctttatctttaacttttttataagagtaaatatattcagttaaatagttaataagctgtatgatttgatagattgaaaaactattactgacattattatcagacttatttttcatattttagataatatttgatatgcctaataatggtcgttttataaatttatcatacttgaaaaccatgagtgtactccagttcatattaaagcgttttctcgctgttattttacgaagaaaaccatgataattaaacttaaaaaaataggcgtttctgccctaaaaaagggtaaataaaaaggtgaatggttttaataccgaatttctttcctaaaacatagaagctttttttatctgtttgagttaatagtttcgtttattagagatggttgggataatagaatttaaagcatttgttttatcattttcatacttatattcattcccatcttgtcaggttaaatcacatttgggtgtagggctttgttctattactcagttttaatcattataaaaatccgagcctttaaagggcttaagtctatggtgctatcccatcagagatgattttatccattatgatgcaggaatataatggctgatgcgttgcgcttatccaactttttgctattatgcacccgatgtggcttttttttacacaacgatgttatactcaaatcgtaaacttcgtccattaaataccgatgtgacgacttttgattttaagaatattaaaggaaacttcacgatgacacataaaagatacagcccctcttgggaaagctatatgggcgattttctaagaggtaactctgggattaatcatttgaaacctcaatatcagtcctttgatgctattggtcttgagaaacagttaaacgagaatacaacgtatattgcgttgctatccttagaggaagcgaaagatgttttagaggatattgattcgccaaaaccaaaaagtccatttataaagaaagtgttttcgattaccgatcctatatcaccctatgcaggtaatatacgtgatgcttttgactttgcaaatgtagtaggagaatttaaaaaattaggaattaaagccacagagtatgttggtaaaaatgggcaaagatatattaaaatctcaggtcatgcggggcttagaaaaatcatcaatgcttcaagatacagtgcttctaacatgaagatgatctctatggggatagggcaacagggaataaatagtagcatagttaagggagttaaattcaatatactattttcctcagcttatcgagcggttgaatacatctttaaggatgaatacacactagctgatttcttaggcaatatttcagtagatctggctaaagcagcagtagcggcttttgcttcttgggttattggaacttttgcagcaactgcatttgctactggtgctagcgtaattgttgtggctggtattatgcttgctattggtattgcaacgacatctatacttgattctatagataaaaattttaaaattagtgaaactataattaatttgatcaaaaaagaattagaaagaaaaccaaaaacaccagaagctaatttcaatcaatttcttcataactgggggaattatggtaaataagaaaaatatcttaccaataatctgtgccattgctatttttattttagcactatcaggtttatttttatctgggggaaacttaatttctttaattaaaatggaagagaaaataatattctcaggtcctgtttttataatatttttctcttttcctttgatttcatatcatatggttttagttattattgtttatataactggtagttatcctaagcatcatgatacctatgttaaatattcagccgcaatagctttttcttcatttattttaagttttcctttatctttttatgtggattataaattaaaaagtgagaattattttgtatgtaaaagaatatcctgggcatcacctaatacctatgtaaaagatattaagctatgtgattaatactattgtatttaatttctttataactggaggggttatgataaataaaaaaaagattatgcatattataggagctttttcttttattattctaacgttatttacttttttttctagcggagaaaatttaatttccttagttaaaatggaagataaaataatattctcaggtcctgtttttatgctattttttgcttttcctttcctttcatactttatagtttctgttattttccttaatataaaaaatcgctggccaaaacatcacgatagttttattaactgttttggggtgattgccattgtttcattctttttaagttttcccctatctttttatgtggattataaattaaaaagtgaaaattatttaatatgtgaaaaaatatcctggaggtcgcctaatacctatgtgaaaaacattaagctatgtgattaatattatcggatttaatttctttataactggaggggttatgataaataaaaaaatattatgcatatcatcggcgcttttgctatttttattttagcactatcaggtttatttttgactggggaaaatctaatttccttaattaaaatggaagagaaaataacattctcaggccctgtttttataatatttttttcttttccttttctttcatactttatagtttctgttattttccttaatataaaaaatcgctggccaaaacatcacgatagttttattaactgttttagggtgatagccattgtttcattctttttaagtttccccctatctttttatgtagattataaattaaaaagtgagaattatttagtatgtgaaagaatatcctggatgtcaccgaatacctatgtaaaagatattaaactatgtgattaacattattgtatttaatttcttcataactgggataattatgaaaaacccctcgtgttgaatttccgtatgctataccataacgacagagttttccgcatgtttttaggcgatgtacacacgggacatccagaccatttttgcccgtgtcgaaaaacacttgtttaccgactaccttggggcaactgaatgaagaaccgcaacatcactgtgcatggctctattgtgaccattaccacccgtcatgatcaggactacatctcattgaccgatatggtcaggagctttggggacgagagtatcctctataactggctgcgtaaccgcaatactatcgagtttctgggaatatgggagcagctctacaacccagccaattttaaacctctcgaattcgagaggtttaaaagccaggcaggtttgaacagtttttcactatcacccaaaaaatggatcgatgctaccggtgccattggcctgtacgccaaatcaggccggggtggcggcacttatgcccaccgcgatatcgctttcgagtttggttcctggctgagtgcagaattcaagctgtacctgatccgtgagttccagcggctcaaggaagaagaagcccgggttaactcattagaatggaatttccaacgcaccctagccaaggtaaattaccgcattcacacggatgccatcaaagaaagactgatccctccgcaactgaccaaaacgcaaactgccattatttatgccagcgaagctgatttgctcaacgtggctttattcggtcagacagcggctcaatggcgacaaaacaacggcaatcaatccggtaacatgcgtgaccatgcaacacttgagcaactggttgtgttgtccaatctggagagcatcaatgcggttctaattcatcaggaactacccgcaccggaacgtctgggtcagttgaatacgatcgccattactcagatgcgctctctagttggtctgtcagatgtcaaacagttgggaaagggttcacaacaattacctgatccctcatcgacacagtaaagagattgaaacctgaaagaaaacgggcaactgcccgttgagtctggaaataggtgtgaacacaattctgatccatattcactaagtgacagctgatgacaagactattggatctgccccaataatctatgctcttgctatttttattttatcgccatgaactttctttttggcaagagaaaatttaatttctttaattaaaatagaagataaaataacattctcagatcctgtttttataatatttttttctttccctttgatctcatatcatatgattttatctattcttgttaatataactggtcattatcctaagcatcatgatacctttgttaaatattcagccgtgatagctttttcttcatttattttaagctttactctatctttttatgtggattataaattaaaaagcgagaattatttagtatgtaaaagaataacctgcacacaccaaattaaacttactttacactattttaatcggtccggtttacgaaatatggcctgatactaaaatcaatgacgacaacctgataactctttgggctgtttgctatccatctcccccctaatactaaaagctcgctttgctctcaattagcattcaggaaggagaattccgccgatttgttaaactcagataatccgatgtttctctaattgaacctgccgcgcagcttcacgcgccatacgttttttacgggcatcacaaggttctgggcaatcacatactttttccaccccaatactgcttaaaccaccgcagctcccttgtatgctcttacgtttaatcatatagcctaacgacattcccgcaaaagccagcaggaaaaagacgaaggcagcaataaatactttcagcatttccttccgcttctcattgatttttctgtaggtatggctcaaaggctttactgtaacgctcttcaaaaccatttttcgtttttataatcataaaaaccgggatattcaaattttccgcaacttccattcctttttccggccctaaaacattcaatccagtagaaagcccatcagcactcatacaaactggagcaatcaccgtaatagagactaaattatgagaaatagggttccccgtttttggatcaatggtatgtgaatagcgcacgccattttgttcaaagtaattacggtaatcacccgaagtcgctatcgacatattcccaggcattatcacttcctgagcattttgtgccatgccagtgtcagatggcttttcaatcgcaatccgccacagcagatctttaccattatgacctgatgtacgaacttcaccgccaatgtcaaccatatagtctttgatattctgtgattccagatattcagcaacaacatctacgccataacctttagcgatagatgataaatcgatatacagctctggaacggttttaatcaggttattaccttctaccaccagtttatcaatcccagtccattcacggcgtttttccagttcactcgcagaaggtgctttcgtcacgtgcccttcgggaccaaacccccataaattaaccaatgggccaaccgtcacatccaatgcgccatcggtcaatttattaatgtagatcgcttctttaaccactttggctgtcgcaggtgataccgggaatggccgatcaatttggcgactttgattaaaacgacttaattcagaatcagggcgatatgtcgacatctgaccgttaacctcctccagcaagcgatcaatctctttttgcagagcttctggcgaaggagccgatgaacccgtgacaaatttaatggaatagtaagtccccattgtttgcccatgaatatttttctgctccagaccatcgcatgccgccagcagcaatactgcaaatattaacgctatccagctacttatctttttacgcacagttaattactctttccgaattgttagcgcccacaaatttgtgggcgccggtcattaaaatcaaactatttatggtgtatcagccgccaaaatcatctaacatgatgttttcatcctcaacaccgagatctttcaacattttgatcaccgcggcattcataaccggaggcccacacatgtaaaactcacaatcttcaggagccggatgatccctcaaataattctcatacagaacattatggataaaaccagtgtaaccatcccagttgtcttcaggcagtgcatctgatagggctacgttccaggtaaagttttcattttcagccgctagctgatcgaaatcctctgtatagaacatttcacgtttagaacgagcaccataccagaagctaatcttacgtttggaattcaatcgattaagctgatcaaagatatgagaacgcattggtgccatacctgcgccaccaccgatgaagatcatttccgcatcagtatcttttgcgaaaaattcaccgaacggacccgaaatagtcactttatcaccgggttttagtgaccaaatataagaagacataattcccggaggtgcttccgaattttttggcggcggcgtcgcaatacgaacgttaagcatgataattccgtgttcttctggatagtttgccattgagtaagcacgaactgttggctctttcacctcagagacaaaacggaacaaattaaatttatcccagtcctcacggtattctttcggcacatcataatcctcgtaacgagcaatatgtggctgagcttcaatctgaatatagccacctgcgcggaaaggtacaacgtccccatcagggatcttcaattttagctctttaatgaaagttgctttgttatcgttggagataacttcacattcccatttcttaacaccgaatatctcttccggtaacttaattttcaggttctgttttacattgacctgacaagccagacgacacccctcttttgcttcacgcttactaatgtgagaaagctctgttggcagaatgtcaccaccaccatctttaatctttacgcggcactgaccacaagagccaccaccaccacaagcagaagagacaaaaatcccctggcttgacaacatatttagcaatttatcaccggcaggagcggtaaagctcttttccggatcaccattaacttcaaccctaatatttccagtgttaactaactttgattttgcgaacaaaatcagcgccgtcagtaccaacacaattagggtaaacatcactacgcctaaaattattatatccatgaacgcttctcgcctttataactggacaccagagaaggacataaaacccaatgccatcaaacccgtagtgacaaaggtgatccccaatcctttcagacccgctggaacatcagcatatttcattttttcacggatagaagccagcagaacaattgccaacatccaacctatacctgagccaaaaccatacacgatggattcagaaaagttatagtcacgctgcgccatgaaagagacaccaccaaaaatcgcacagttaaccgtaatcagtggtaaaaaaatgccaagcgcgttatagagtgaagggaaataacgatcaaggatcatttcaagaatctgcactaatgcagcaatcacgccaataaatgtaataaagttcagaaagctgagatcaaccccttcaaccaatgcaccgtcacgcaataccaagttatacaccaggttattagcaggaaccgagatccctaaaaccaccgtgacggcaatacccagaccaaacgctgttgtgacatttttcgatacggccaaaaaggtgcacataccgaggaagaaagccaacgccatgttctcaataaagacagcgcggacaaacaggcttataaaatgttccatgttgtcagttactccttctcaacctgcgccggtttcaacgtcctcagaccccaaatcagcataccaataatgaaaaacgcgcttggggctaacaggaacaaaccattaggttgataccagccaccattctgtaccgattccatcacggtaatcccaaacagtttgccggaaccaaacaactcacgcaggaaaccaaccaataccagaataaccccgtaacctaaaccattaccgataccatccataaagctctcaatgggtggagacttcatcgcataggcttccgcacgtcccatcacgatacagttagtaatgataagaccaacaaataccgacaactgcttggaaatctcataagcataagcctgtaaaatctgatctaccacgataaccagtgatgcaataatagccatctggacaatgatccgcacactgccggggatgtaatgacgaatcaacgagataaaaaagctggaaaaggcagtcaccaatgttaccgctattgtcatgaccaacgccgtttccagcttggttgttaccgccagcgctgagcaaatccccaaaacctgcaatgcaatcgggttattatccaagagtggcccaagaaggactcgttttatttctttactatcagccatctttcaacgctccttcgcgtacttttttcaggaacggaccaaaaccgttatcccctaaccagaaattaaacatattctggacaccggcagaggtgagagtcgcaccagacaaaccatcaacaccataagagtcatcggcagcggcaccgccacgaacaattttaatcgccgggttgccttcatcgttatacagttttttacctatccactttttacgccactgcgggttatccacttctccccccaaccccggcgtttcgccatgcgaataataagtgataccgcgagccgttttgccgtccacatcaacggagataaaagcatacataacagaccacaagccagaaccatagataggcagaacgatttcacgagttttaccctgttcattcttcaccagatagacctcggccatattggcgcgacggcgaattttcgccagatccttttcaggtggtaatgcaatactggtatcatcactgcgcaacgcatcgttcaggttaaacttgccctgactgctttcaagcgttgccgtctccagattcaataactcagttttaatgcgtcttttgaacgcttctttaacctcatcggcactcatctgtggattaagtaaccccgcaacatcgaggatattacgctgtttatccagcaatttttgttcctgttgctgagatttcagccctaccgcagaacctgctaccacaattgagcaaacgagacatagcacaaaaacaacgataaatgttctgccgatgctgtcattattttttggtttatcattagccacgggcttttctccgcttaatattggcctgcactaccagataatcaaacaatggcgcaaacaggtttgcgaacagaatcgccagcatcataccttccgggtatgccgggttaacaaccctgatcagaacgcacattacaccaatcagaacgccgtaccaccatttacctttatcggtaaatgaagcagacactggatcggtcgccataaaaatcataccaaaagcaaaaccacccagaaccatatgccaataccacggcatagcaaacaacgggttagtctctgaaccgatagcattaaataggtaggaagttgcaaccatacccaacatcaccccggcgacaatgcgccatgaagcaatgcgggtaaacaggataattgccccaccgatgaaaatcatcagcgtagatacttctccgatagaaccaggaatattaccaatgaaagcatccatccaggtaacaggctgaccggtaacggtattcactaatccctgactaccaccagccgcccattgagataacggggtcgcaccagagaaaccatcagccgcagtccataccaaatcacctgaaatctgtgcagggtaagcaaagaatagaaaagcacggccagccagtgccgggttcaggaagttacgacctgtaccaccgaagacttctttcgcaatgacaacaccgaatgtaatacccagcgccgcctgccacagaggaatcgttggtggaacaatcaacgcaaataaaatagaagtaacgaaaaatccttcgttaatttcatgcttacggataagggcaaacagcacttcccagaagccacccaccacaaatacaacgatgtaaacaggcaaaaagtaagttgcaccaagcaacattttactgccccaacccgcatccggtgtcagtgatgcccccaaaaactgagcaacgcaatagtgccagtcagataccaaaagttgttgtaattctgcgccactgtataaatgatacaacgcagggatcgcctgctgaccaacgttatacattccccagaacattgccgggaatacggccagccataccatgatcatcatacgctttagatcgatagcatcacggacatgggcaccgccagaagttactgtacctggtgtatagaaaatcgtcgttaccgcttcatacaacggataatatttttctaatttgcccccgagctcaaagtggtgctcaattttttcaaaatagtttttcaggcccatgaaatcatccttcctgctcaatcttagtcagcacttcacgcagtaccggaccatattcatatttgccaggacagacataggtacaaagcgctaagtcttcctcatctaactccagacaacccagtgcctgagcactatcggtatcacccgccagcagatcccgcagcaaatgcgttgccataatatccaaaggcataacacgctcatagttaccaattggtaccatagaacgttcaccaccattcattgtggttgaaaaagcaaagcgcttatttttcaggaaatgaccaatggtggtgcgggtgatagaaaatttatcgatgcccggcatgatccaaccaaatagctctttttcgcgaccttcacgcaaaacggaaaccaaagtgtggaaacgaccaagatagtgatgaacctcatctgactgagtaccgcacaatacggaacctgaaataatacggttttcaccctgtttaagctgaccctgagttaactcaagcagatcggcccctaagcaagtacgtatgagacggggtttctcaacctgtggaccggccaatgcaatgacacgatcagtataaagtgtaccggtagtgaataatttaccgatcgcaatcacatcctgatatcccaggtgccataccgttttagtcgcactgacgggttcaataaagtgaatatgagttccagctaatcccgcagggtgcggaccagagaactgattataagtgatttgtgcattattaccgacattcggcaagcttcctgcactatggcaaacatggactttaccttcggtcagtttagtcagtacattcagaccatcaacaaaagcctctttatcggtagcaataatcacctgtgaatttgcagccagaggctgagtatccatcgcggttacaaaaattgcttttggcgaggagccgggagcaggacttcggctgtaaggacgggtacgtagtgcagtccataacccggaatcaatcagattcttttccacttgttctcgggataattgagtaaattgggcacgatcataacggtcaaaattaacctgttcgtctcccgttatctcaatcacaattgactgcaaaatacgttgttcaccacgattaatcgctacaacctgcccacaggctgggctggtgaaaaccacacctggattctttttatcttcaaaaagaatctggcccttcttaacatgctcaccttccttcaccaacatagaaggacgcattccaacatactcttcacccaacagtgctacatggcgaatcgtcggaccgtcttctattacttgagcaggcgctcctgcaatcgggaggtcgagtccttttttaattttaatcataagatttgcacaagtttatcaattaaatcatatgctacagattacctggtggtaatatagccactctataaaaaaccccttaagtcacgaatcgtgcccaggttataattctccgataattgttacgattttctgttaatctccgggcggcaattttaacatctcccttcttagactgtctgactaatcaagtgatttagttcaagcaaacaggaataattttggcattgaacgattaaccgatcgcaaaaaacgaatgattatatcacctttaccgacaactgattgtattttaacctaacaatcactttgtagtgataaagttaccgtcatcattttctattcacaaagtcgatgactcatggcaatcttaagctaaatttttagttagttcgcgacatcgctattacggtagtcacatgaaaaaaattgcggcttttcctgcaataattacaataatattgttgttatttagttcatttactcctgtctatactcaggatactttagtgcaattgcagcaaaatttccctgtgcagcctggctctcctgtctttatccaaatattcaaagaagagcggatattggagctttatactaaaaatagtcatggaagctaccaactgtctaaaagctaccccatctgtaattactctggcggccttggtcccaaaaccacagaaggtgatctgaaaagcccggaaggcttctatcgtgtaaaaacccatcaacttaatccaaatagtcggtattaccgatctattaatctcggctttccaaatgaatacgataaattcagaggctattccggcaactatttaatgatccacggagagtgtaaatctgtcggttgctatgcgatgactaatggttatatggatgagatctaccattatgtagaaagtgcattattgcgcgggcaatatgaaattaatatcagtatttatccattcagaatgacaccacagaatatgctacgccatcgttcatcctcccactatatgttttggttacaattacagccggcttatgaatattttgcaaaaaatcaccagccagcaacggtcagcatcattaacggccaatatgtggttaatgctacacctgaaaaatcaccacttttgcagcatcaatcacaatatgcgttcaccaagatgaaatagtgcatagcgacccggctcaatacgattccaagcttcattacccgttaaaggttgagtaacaatgacagaaacaacatcatccggctgtgtatgttgttgaaaatcaatttcaatatcttgatccagaagtttcgcttttccaaacggcgcccgacgggtaatccaataaaggttggttgaacaatatgccatcataaaacgcccatctgacaacaacatattaaatacgccttttttgctgagctcatctgctagtgaagcgataaaacgaaaaaccttaggccaattggagggggttcttgggtatttttgtgaaagttgctgcaaaatccagcaaaaagcatgttcgctatcagtttgcccaacgggacgatactgacccgtttcaagctgccgatagccccgaagctgcccattatgggcataagtccagttgcgcccccacatctcacggatgaaaggatgagtattttccaacgtaacattaccgcgattagcctgccggatatgagaaaccaccactctagatttaatcggatactcttgtacaaagcgggcaacgggtgaattgtaacttggttgatgatctttaaatgtgcgacagccccgcccctcataaaaagtgatcccccaaccatctttatggggcccagtatgaccacctcgctgaatcaagccacctaaactaaagcagatatctgttggcacatttgcactcatgccaagtaactcacacattgcccacctctgtagcctgtatacccgtcatctttcaagttgcctctttgttggctgcactcactcaccccggtcacatcgttacctatgctcccggggattcgctcccttgccgtcgcgatccatcttgaaatccatagggtataaaatcaagctttaaccatctctttttcaataagttgaatcaggatatgaataactttgatatgaatttcctgaatacgatctgcataaccaaaatgcgggacacgaatttccacatcagcggttcctgccattttaccgccatccttgcctgtcaacgtaatgactttcatgccttttaagcgggcagcttcaactgctttgataatattaccggaattaccggaagtagagatacccagtaatacatcgccctctttccctaccgcttctatataacgagaaaaaacaaattcatacccgaaatcattactgacgcaggaaagatgactgacatcagaaatcgcaatcgctggatagccaggacgattctcgcggtaacgacctgttaattcttcggcaaaatgcatcgcatcacaatgcgaacccccattaccgcaggacagtaccttgccacccactttaaatgaatcagccagcaatactgctgctttttgaattgcttcaatatttgcatcgtcacttaaaaactttgccagcgtatccgcggcttcgttcaattcactacggatcaagtcttgatacataggctcctcacttcggtcaggtaatctttaatgttgtgccggatggcagtttaccggatcaagagaattgaaagaagacaacatcacatttctggagaattaatccgttcctgatcactgcgagtttgtgagctacattgtaattaagatgtaaagatattgctaaaagcaatttcctggtctaaaaagagaagaacaccacaacaggtccgacctctgatgacttacctgaccctgagattaaccaggagcttttattatgaccacattgagtattattctattcttagtcttgattgggatactttgctatcacaaagtcaatctcagtctcagcagcctactgctccttgtctataccgtcctgatgggcgctattgatgcatggagctactggatgttgttaccaatggccattattctgttcccgctgaattttgcgccaatgcgccactccttactgactgttccggccttaaaagccttccgtaaagtaatgccaagtctatctcgcacggaaaaagaagctcttgatgcaggaactacctggtgggaaggcgagctgttccgcggtaaacccgactggaaaaaattgcatgactatccaaggcctcagctaaccgctgaagaacaagcatttctggatggcccggtagaagaagcttgccgcatgaccaatgatttccagataagccatgaacttgctgatttaccacctgagttatggcgttacctgaaagaacaccgcttctttgccatgatcattaaaaaagagtatggcggtctggaattctcagcctatgcacaggcacgagtcctgcaaaaattggcgggggcatccggcattttggcaatcaccgtaggtgtacctaactctctcggcccaggtgaattgttacagcattatggcaccgaagagcagaaaaaccgctatctacccgggcttgcccgtggtgaagagatcccatgtttcgcactgaccagcccggaagctggctctgatgccggatcaatcccagatacaggcgtagtctgtatgggagaatggcaaggtgaacaaattctcggtatgcgcctgacctggaacaaacgttatatcacacttgcacctatcgccaccgtactcggtctggctttcaaactgtccgaccctgaccatttattgggtgatacagaagaattgggcattacctgtgcattgatcccgaccaatgtaccaggagtagaaattggtcatcgccatttcccactgaatattccattccagaatggcccgactcgcggtaaagatatctttgttccgatcgactatattattggcgggccaaaaatggccggacaaggctggcgtatgctggttgagtgtctgtctgttggccgcggtatcactctgccatcaaatgcaaccggcggtttgaaaagcgttgcgatggcaattggtgcatactcttatatccgccgccaatttaaaatgccaattggtaaaatggaagggattgaagaaccactagcacgcattgccggtaacacctatttgatggatgccgcttcaacacttgcaacaaccggtatcatgctaggtgaaaaaccctctgtgttatccgctatcgtgaaatatcactgtactcaccgaggccaacgctcaattattgacgcaatggatattgccggtggtaaaggtatctgccttggtccatccaacttccttgctcgcgcttatcaaggtgcacctatcgccattaccgttgaaggtgccaatattctgacccgtaacatgattatctacggtcagggagctatccgctgccatccttatgtacttgacgaaatggccgcggttgaaaataaccgtattaaagattttgataaggcactgtttagccaccttggtcacgttgctagtaacacgttacgcagcttctggcttggcttaaccaatggccgcaccagcagcacaccggtcaatgatgcaacacgccgttactatcagcaattaaaccgcctgagcaccaaccttgcgctattatcagatgtggcaatgggggtattaggtggtagcctgaaacgccgtgaacgtgtctccgcccgtcttggagatgttttgagtcaaacctatctggcttccgcgacattaaaacgctatgaagatgaaggtcgtcaaaaagaagatttgccgctagttcagtgggccgttcaagatagtttgtatcaggcagaacaggcgatagataacttactgagtaacttcccgaatcgtctggttgccggtctgatgcgtgttattgtcttccctctagggcgtgtacactcagcaccatctgaccatctggatcacaaactggcccagatcttacagcaaccttcggctacccgtgatcgcattggccgaggtcaatatctgacaccaaacgagcacaatcctcacggattattggaagaagcgctgcacgatattattgccgcagaaccgatccacgcccgtttgagtcgcgaagcaggtaagcgtcttggctttactcgcctggataaactggcagaacaggcactcgcagaacgtaagatcacgccagacgaggccgcaattctaaaacgtgcggaagcaagccgtctgcgttctattaatgtcgatgagtttgaaccagaagcgctggctgttcctgcccgcgttgaaaaactgagaacagaagccgcctgaaactgacgactaaagagagttaagcactaaattaatcacggggcgatatcttaacaaatatcgccccatattttatgacgtagaggcacaagatacttcttccaatgctaacaactcttcaatcgtttgacggcgacgaattaattgaggcttaccattaacaaacaacacttcagagataagcggacggctattgtaattggaagacattgacgcaccataggcaccagtgtcatgaaaaactaaatagtcgccaacttgaacaggtggcaatgctcttggcgcaattccaccgccctcaacctgcgtaaagatatcaccggattcacataacggccccgcaactaacgtttcccgcaatggcaattgctcaatcttacgtccatcagcaggcaaaaccgagatatggtgataactgccatacattactggacgcattaagtcattgaaccccgcatccaccagaacataattacggttccccatctgcttaaccgcccgaacttctgtcatcaaaacgccagattccgcaaccaaaaaacgccccggttcaatttccaactcaattttatgacccaaatgctgctcaattcttttacgagcatcatcccacaacccaaaataatgagcgatattgattcgttcatctccctgatgataaggagtcgataaacctccaccggctgaaattgcctgaatatcttcaccacaaagaataacctgttcaaccatcgcattacatacactggcaaggtgatgataatcaacaccagagccaatatgcatatgtaaaccaagcaatttcaatccatagtggcggattttttcaattgcctgaggaagattctggtaccaaataccatgtttactgttttcacccccggtattcgtcttctggctatgaccatgaccaaacccaggattaatccgcaaccacaccggatgcccttttttatattgaccaatctgttccaacatatcgatagaacccgcattaaccggaatatccaattcggttactctttgcagcgtcgacacatcgattaaatcagcagtgaaaatgatatctgacacttcttgccctggacaaaacccggcccgtaaagcacgttcaatttcccctagcgaaacggcatcaactttcacaccatactcacgcatcaggcgtaaaatgtgagtattagaacacgctttctgagcaaacctgaccacatcaaattgacataacaaattgattttttggataattgtttcactatcgtaaacccataatggagtaccatacgtttctggcagacgacccaaactctccggtatcagattaggacaattattacgggtaaaattgggagtaaaagtagtactcatcagggtttctctcacaaagtcagcagataacccattattggcagtaaaaaacaggaataaaaatatccatttcgttatagtctattcatctgtgatatagaattatcctttgaaggaacaaacaatttatgccttcttgttcatggcgccatattgaaatcttccatgcagtaatgacgacaaaaaatctgacagaagcggctattttattacaaacatcacaaccaaccgtcagtcgtgaattagcacgattcgagcatctaataaaattcaaactatttgaccgagtaaaaggccgcctgcatccgacagcacaaggattacgcctttttgaagaagttcagcgctcttattatggactcgaaagaataatgaatgcggctgacaatatacgtaaatttcaacatgctcagctttccattgcctgcctgccagtattttctcaatcactattaccgaaagtttgccatcacttcatccgtcaatatcctgagactaatttaacaatcattccacaggaatcaccgctactggaagagtggctttcagctcaacgccatgatctgggtttgacagaacatttgcagacaccaccgggtacacagagagaaacactgatcacgctgaatgaaatttgcgtattgcccgctgctcaccctctcagtcataagccgctattgactccagaagatttcagcgaacaaaatttcatcagcctttcaataacggatagctaccgtcagctcattgatggaatattcgcagaacaccatattcgccgtcgcatgattatggaaactcacagtgctgcatcagtatgtgcaatggtgcgcgaaggcattggtatttcgattgtcaacccactgaccgtactcgattatctagagagtcacggcaaatctgaaatatgcgctcgcccatttagtattaacattccttttactgtcagcctgataaaacccattcaccgcccttcttctgccccagttgatacttttattgaacacctaaaagcacaaattgctctgtttcctcagaaactaaagtcagcttttcagcattagggcttgccagtacggagaagaagcaaaccattgaaccagaaaatccagtaatgccctcagcgttgctggcatattttgacggctggcataaataccataaattcccatcgcttgaggtcgatattctggcaacaactgaatcaattttcctgacgccaaatgcgaagcaacagaataataaggttgcatagcgattcccgcaccttgcaatgttgcttccattaacaccatcgattcattggcactcaaagtaccgctaacaggaacagaatatttttcccctcgatgttcaaataaccaaagacttttaccaaaaaagttataagtcatacagttatgcaaggctaaatccgcaggcttttgcgggagcatttttcccgccagataacaaggggcggcacaaaccacagaatgacatgtcgataacggtctggcgatcaaattgggttccagattattcgtgatgcgtaacgctaaatctatccgctcctcgaccaaatttattgccttattgcttatttgcatatcaatcgctatctgaggataaatctgcataaactcaggaatcgccacagacaacgcgcttactgccagagattgagaactgcttatccgcaaaagaccactcagctcctgcgcttctactggttgatgaactggtatctcttccgacaattgcaataacttacgactgcgctgataggcgatctctcctgctgatgtcaggctgatctttctcgttgtacgatgtaacagacgtacccccgcccatttttccatttcagccaaataacgggataccattgcccgcgacatatctaaccgttccgatgcagcaatcatgctgccttgttctacaattatagtgaacacttgcgcagcagtgattctatccatcaattagctcgatttatgcaacaaataattacccattatgcggtttttccatcgaaaaacgcaacttattatgaacctcgttcacacaacatcaggaattcaatcatgactcgcaaaacaacactcaatattgcgctggcaggtatcctttccttgggtaccatttctctggcacaagccgctgatctcaaactggatgtttataatccgggtgagaaaagcctatttcccgtctcttctgaaatcatcagtggagataaagaagttgtcctgatcgatgctcagtttcaaaaaaatgatgctgaagcactggtcaaaagaattaaagataccggcaaaaagctgacaaccatttatatcagtcagtccgatcctgatttctatttcggccttgaagtactgaccaaagcattccctgatgccaaagtcattgcatcaccagaaacaattaaagaaatcaacaagaccaaagatggcaaactggcttattggggaggtgtcctgaaagaacaggcacccaaaaaagtcatcgtgccgcaaccactggaaggtcactcttttacagttgatggtgaaaaactgatcgtcgaaggtcttgatggcccagcggctgatcgtacttttgtttggataccaaaactaaaatcggtagtaggtggcgtcaccgtttcaagcaacattcatgtctggatggcggatacacagactaaagagtcgcgtaaaaactggatgcagacactagatcgtataaaagagctgaaaccgacaattgtggttccggggcatttcattggtaacacaccaatgacgttggaatccgttcatttcacgcaaaaatatctgaccatttttgagaaagagctggcaaaagcgaaagattcaaaagcgctaatcgccgcaatggaaaaacactatccaaaacttggagacaaatccagtctcgaattaagtgctaaggtgctgaaaggcgaaatgaagtggccccaataagtaaattaactctttttcaggaataagtaatatgcccggaatgactctgcattatatctatgatccactatgtggctggtgttatggcgtttcctctctgatacaagccgcaaaagaggtcgcaaatgtgaaaattgaattgcatggcggcggaatgctgacaggtgataatagacgtcaaatagacaacacatggcgtgattatgtccttagtcaggataaacggatcgcaagccttaccgggcaaattttcagtgagcaatatgtcgcactgttaaatgataaatcactgattatggattcattaccaccaatatcagccattcttgcagcagaaaaattggctggtaaaggtgtcgaaatgttactagcagtacaaaaagcgcattatgttcgtggattaaaaatcagcgaaactgaaacattattgaatttagcaaatgaactacagcttgattcagaacagttccagcaggagctgatattgaataatgaatcagaaagtctccaacatattaggaaaagccgtgaattattggcaaaagttggcggctcaggtttccctacatttattttagaaaatgacagaaatgagctatctattatttctcttgataaatacttgggacaacctaaacgttggcaagatgcgctgattcattatcaattttaatcccacagttctaataccacaattttaactactggtgcccatacgttttcagctatcgggcaccatccacgatatcccatccattcccaataaattcaaatagatcattatgaccgcagaaatggctatatatgggccaaaagcaacaggctcttggcaattttctcgtattctccacatccataagcacccaataagaccaaacagtgaggataagagcattaataaaggaattgcaccaatccccaaccaagcactaaccgccgccattaacttaaaatcaccatatcctaacccttctttatgacaaattattctaaataaccaatagagcgaccataaaatcaaataacccacaatcgcacctgtcacagcttgttcaataggcacaaaagtttgattcaaattcaataataatcctaaccataacagtggataatttattatgtctggcaataacttaatttttatatcaataaaagacaatataattaacacccaaacaaatatcaaaacaacatataaatggaaatttaatgaaaaataaatcataaagaaagctgttataaacagtgtcactaattcaacctgaaaataaccaaaaactattttttcatagccataaataattttaataaatacggctatcactttattcaaaatcattcctgatactattccaatacaaatagctaaaacaataaccttaatattaaaatccatttaataaaacatctccaataaataaaaaaacaaatattcattatgtttttggcataaaaagataataataaacaccactacattaaaacaacaaaataaatataaaatagtcaaataagatataaatatgcgagcagactcgcaacatttattcagagataacaatctgcatcgagatagcttgataattggattaagcctcctttatcatacccaccattatttattgctttatgtatacccgcaggaaggaaagaaaaacatgcgtataccccgcgtatatcacccggaattactctcatcgaatactgaaatttatctgagtgatgaggcggctaaccatgttgggcgggtactcagaatgagccacggtcagcagttgcaactgtttgatggcagcaatcagattttcaacgctcagattaccgaagctagcaaaaaatctgtcaaagtacatatcagcaatagcgaacttgccgataatgaatcaccacttaatctccatctggggcaagtcatatcccgcggtgagaaaatggaattcaccattcaaaaatctgtagaattaggggtaaatgttattacgcctttaatttctgaacgctgtggtgtaaagctggatggagaacggctggctaaaaagcttcaacagtggcagaaaattgctattgctgcctgtgagcaatgctgtcgtaaccgtgtccctgaaattcgcccagtgatgcaacttgagcactggtgtgcagaaaatgatggcagtttaaaattaaatctacatccacgagccagccaaagcatcaataccctgcctttacctgtagaaaaagtgcgtttactgatcggcccggaagggggattatcgatagatgaaattgctatgacagctaattaccaatttactgatatcctattaggaccacgggtactgagaacagaaacgacagcgctcaccgcaattactgcattacaagtgcgtttcggcgatttgggttaaggagaaagaatgatcaaactcggcatcgtgatggaccccatttcatccatcaacatcaagaaagacaccagttttgccatgctattagaagcacaacgtcgcagctgggaactccattatatggagatgagtgatctttatctgcaccaaggggaagcccgcgcacgtacccgcttattgcaggtagaaaaccatccacaacaatggtatcaattcgatagagaacaagatctggcactggaaacattggatgtcatcctgatgcgtaaagatccaccatttgataccgaatacatttacgccacttatattttagaacgcgcggaagagaaaggcactctcattgtcaataaaccacaaagcctacgcgattgtaacgaaaaactcttcacagcctggttccctgaattaacaccagatacattagtgactcgcaatgccgctcacttacgtgaatttcaccagaaacatggtgatgtcatctttaaaccactagatggtatgggcggtgcatcgatattccgcctgaaaaaagatgacccaaacgtcggggttattattgaaaccctgacggaacatggcaatcgcttctgcatggcacagaatttcttaccggccatcaaagaaggtgataagcgggtattaattgtcgatggcgaacccgttccttattgcctggctcgtatcccagcccaaggtgaaacccgtggtaatcttgctgcgggtggccgtggtgaagctcgcccgctttcagaaagtgactgggctatcgccagagctgttgctccaacgttgcaagaaaaagggttaatctttgttggcctggacatcattggtgacaaactgactgaaattaatgtcaccagtccaacctgtgcacgcgagatagaagccgctttccctgatatttcaattactggcatgttaatgaatgcaattgaagaacgattagagaaataaaaaattctttttacgaatttgcctgtcaaggtttgtcatttatacttttagcccacatactgttgggctaaataatccttacatagccaggttaattactagaaaaaaaatgaatctacagcaccattttcttatcgccatgccttcattatctgatccctatttcaaacgctcagttgtttacatatgtgaacacaatgcaaatggggcaatgggattggtgataaataaacctattgagcaaatctccgttcggaaagttttacaaaagctgaaaatatcaccagaagatcgggatgaaagtgtcaatctaaacaagcctgtcatgactggtggcccacttgctgaagatcatggttttatattgcacacaccaaaacccggtttcagttcaagtatcaaaatttccgatgacacaatgatcaccacctccaaagatgtccttgaaaccttgggtacaccacgccaaccaaaacagatattggtcacgttggggtataccagttgggaaaaaggccaacttgaaaaagagataatggagaatagttggctaacaacaaacgctgatccacacattattttcaactcacctattgcggaccgctggcgtgaagccgcatctttgctcggaatcaatatctataatattgcgccacaggcgggacatgcatagatgaataatcgtacaataatggccttcgattttggcacccgcagcatcggcgcagctattggacaagaaatcacgggcaccgccagagcattaacctcgtttaaagccacagatggtatccccaattgggggcaaatcgaaaaattacttaaagaatggcaacccgatctggttatcgttggtcttcccctcaatatggatggcactgagcaattcgtcacagtgcaagcacgtaaatttgcaaaccggctacatggccggtttggcgtacaagtgcaactccaagatgaacgcctgacaacggttgaagcccgtgctcatctgtttgaccgaggtggttataaggctttaaataaaggaaaagtagatgctacttccgctgttattattctggaaagctggtttgaacagcgctattaatagcaatcaaccaacagtaacagcaatcaattaacagcaaccatataaccgcgattaactgatagcattttctttaatcttcctttccgtttgctctgccagtaatccctgcaatttacgctgctgccagccttgttcataggtttgcatcccactggcagcgcccgtctgcataagcgttgttatttgatgattttttccttctcgtatcagatgactcactgcctgattaactaccaatacttcatatatagcaactcgtccccctccctgggcagagactaattgctgtgctatcacagctttcaggctgcctgctagctggctacgtacccaccctttttcttcagcggaaaaaatatccaccagccggtcaattgcctgtacagcacctcgggtatgcaaagtcgacaataccaaatgcccagtctctgccgcggttaacgccaagcgtattgtctctttatcccgcagctcacccaacaacaatacatcaggatcttgccggagagccccttttaacgcagcctgataactgggagaatccaacccaatttgccgttgttgtatcaaacaattgcgactatggtggataaattccacaggatcttccaatgtaataatgtgctgacaacagtggctgttcagcatatccacaatggcagttaacgttgtcgactttccgctgcctgtagcgccggttaccaagatcaacccactctcttcccgcaaagccatttcacggataatttcaggtgcttttagctgttccagagttgaacactgagagtgaattaaacgcaaaacggctgacaacccggagtgctgacgaaagatgttgcctctcaatcgttggccattttctgtttccaacgcaaaatccacatgtccactagttaatagctgttgtcgctgattttctgataaaaactgcctactccactcttccagcaatagattatttacagattgcagttgagtttgcggacaaagcactccatttatacgtaatacaggaacttgcccaatacaaagatgcagatctgaagcattatgctttacactaagggccactagcttatccatattcattttttaatctcctgagtcaccatgaacaatattgaacaaaatttacaagatgtcaggacccacatagccattgccgcacagaaatgcgaacgcgctccagaagaaattaccttgcttgcagtcagtaaaaccaaacctgtggaagatatcgaaaaagcaatcgctgccgggcaacgccagtttggtgaaaattatgtgcaggaaggtgtagaaaaaattgcttattttgcaaattgtaatgatttgatatggcactttatcggtccgttacagtctaataaaagccgtttggtggcagaaaattttaactggtgccataccatagaccgcttaaaaatagcacaacgcctgaacgaacaacgcccggagggaatggaaccgctgaatattcttattcaaataaatatcagtgatgaacggagcaaatcaggtattcaacttgatgaactatcaacgctggcagccgaaatgaacaaactgccgaatgtaaggctccgtggtttaatggcaatcccggcaccagaacctgactatgcacatcaattagcggttttcaggagaatggaacaagccttccttaacctgaaaacgaaatatccccaaatagatactctttcaatggggatgactgatgatatggctgccgctattaattgtggttccacattagtacgaattggaacagcaattttcggtgcacgtcagtatcacaattaaccatttcaatgctacgaggtattcaatggagagacgtaaaattaccttgattggtgcaggtaatatggctcacgccatcatagctggattagtaaaaggagggtaccctgctgagctgattaatgtctgcgcaccaagtcatactcgccgtgatgcactcgcaacagagtatggcgttaacagcggtagtgacaatattcgctacgcacaggaagcggacgttgttgttctggcggtaaaaccgcaagtgatggtagatgtctgccagcctctgaaagaaaatgtagatttcagtaacaagctggttctgtctattgcctcaggtatttccgttgcacgttttgatgctttattacaagacaaactcaatattgttcgtatcatgccaaacacgccggcattaattggtcaaggggtgagtggattattcgcatctgagcaagtcagtcagtctgaccgtgatttcactcaagcattaatgaacagtgttggtaaaacttactgggtaaaagatgaaaacggcatcaatgacgttatcgccgcagcaggcagtgcgcccgcttatttcttcctatttatggaatcaatgcaacaggaagcagaacgtttaggttttgataaccaaacagcccgtgaaattattttgcaaacggcaataggttctgcggcactggccgcatcaaatgtagatctcccttttgcaaccctgcgtgaacaggtaacatctaaaggcggtactactgcggaagcattacgtattttttatgaaggcaaattaccggaaaccatatccaacgcgatgcaggcggctattcgccgggcacaggaaatggaaaaacaattttaattttatcaaggctgctaaatgcaatttttaacctttattctgttcacagttctggatttatacatcgctgttttattacttcgtgtatggatgcaatgggcccgttgtgatttttataacccatttgcccaatttattgtgaaaatgacccaaccgatcattcggccattgcgccgagtgataccatctattggttcgctcgatactgcctccattgttatcgcttacgttctggtattgtttaaattaatcatgcaactttggttcagtaccggtacggttgctttcctcacacttttcatccctatcgggttaatcgaattgctaacagcaacaggtaaactggtattttggttagtgctggcacgcgctctactaagctggataagccaagggcgcaatccgattgactatgttctgatgcaactaacagagccattgatggcacctatccgccgtattatcccaacaatgggcggccttgatttttcagcaatgatcgtcattttgatcctctacgcattgaactatcttcgcgctgatgttctctcatggctgatacagtaaataagaattaaattgggttcaaaataatgcaaaaagtcgttctggcaaccggcaaccccggaaaagttcgtgaactggcacaattactggctgattttggtctggatattgttgctcaaactgagttaggcgtagattcagccgaagagaccgggctgacatttattgaaaatgccattcttaaagctcgccacgccgcacaagttaccggcctgcccgcaattgctgatgattctggcctatccgtagacatccttggtggagctccgggtatctattcagctcgctatgcaggagaaaatgccactgaccagcaaaatttggaaaaattgctggatacgatgaaagatattcctgacgatcaacgtcaagctcagtttaactgtgtgctggtttatatacgccatgcagaagatccaacacctctggtatttcatggccgctggccggggttcatcgcacataaatctgccggtaatggtgggttcggttatgatcccatcttttacataccggaattaggctgtactgcggctgaattaactggtgaacaaaaaaatgctgtttcacatcgtggtcaggcactaaagatgatgttggatacactacgtaatgcttaagctcccaccactaagtctttatatccatattccgtggtgtgtacaaaagtgcccttactgtgatttcaactctcatgccttgaaaggtgatgttccacaccaagagtatgttgaccatttattggcagatctgaaaacggatctgccaatggtcaatggtcgggaagttaccactatctttattggtggtggaacccctagcctgcttagctcacaagcaatgcaacaattgctggatggtgtccgtgccctcctgccggtatcgccacaagctgaaattactatggaagccaatccgggtactgtggaagccgaccgctttagtggttatcagcaagcgggtattaaccgaatatccattggcgtgcaaagtttcagtccagataaactggtacgccttggccgtattcacggaccggatgaagccaaacgggcagcacatttagccgctagtctggggctacgcagttttaatctggatttgatgcatggtttgccgaaccaaagccttgatgaagcgctagatgatttacgtcaggcaatcgagttatcaccaccgcatctttcatggtatcagttgactattgaacctaataccagctttggttcccgccctccggttctgcccgacgatgatgcgttgtgggatattttttcacaaggtcaccaattgctgacagcagcgggttatcagcaatacgaaacttctgcttatgccaaaccaggttaccaatgccagcataatctcaactactggcgctttggcgattaccttggtattggctgcggtgctcatggaaaaatcacatttgaagatggccgtattctgcgtacagtgaaaaccaaacatccccgtggatatatgcaggggcgctatctggataaacagcatcaggtagaaaatgaagatcggccatttgaattttttatgaaccgattccgtttactagaagcaatgccaaaacaagatttcagtgatttcaccgggttatctgaaacctcaattcgtactcaaattaaacaagccttagccgcaggttatctctctgaaacagcaacacactggcaaattacgcagaaaggcaaactgttcctaaattcattattggaactatttctctagcacaaaaattgcttttggaaaattcagtttcacaacggttatctttacataaaattgataccgccattggttttggtgctattcataatcattccccctactgaacttcagtgggggtactcattagacaatagcaactgattgtccagtgttgaattccttctcttttcggagggctgattatccctcccaatttaaataaaatataaattacaaattacaaattacaaattacaaattacaaattacaaattaaccaaggtattaatattaaaataataatccatattttaattttcaataacagaaaatcaatatttataaaagaaaatcaacaaataatagtgtaaaaacaaatgaaaaattcacaaatctctcctgtaaatatacttaccatgtagataatagttaatgtcgatcattaataagtgtattaattaataatttaataaaaacacgttctacacaatattaattttaacatatgtgaattacgacacaataatatcatttaaattatctcaaatacgactatatttaatttgtgtttggttatatttatattaacaagcacgaacatttaaaaaaaatttttaatttcactttgcttggagtaaaaaatgaatattgaaaataaagaaatgttatataccttgtccaaagaagacctcgccacagaactaactccgtattatcaagatttttatgatcaactttccgatcatcaaaaggaaaatattagctttgacatggttgtaaatgatgcttacaagagattacattttaataactcagagccaactgacactgatggaagattaaaattaatagagtacgcaggtgaatctccatgcattcatgcaattggtatagttgtcgcagatgcttttaaacttgcatttaaattcatgggcatacataaacctgaaagagaatcagccacacagatattattgaaaaaattaggtcatgatgctatacatgagctacttactatagttcataaccttaagaattcgaattctattactgataaatcaaagcatacctggtcattaatttccgcagttgaaagtattttaggtatttctggaataactgattgcttaaaagagacaatgcattggtacaattggatgattactggaataactgcaatcgcacaattaaccatatggtttgctacaggtggagctgcatttattgcagaaatagcactggcgggtcctgctatagccagattagcccttgactctgtagacgcggctaatacttgttcataaaacctttatctgtaatctcatttaattatcaaggaacttattatttattataagttcctttcaatataagtatcattacccatattataaactcgaataaatcagacgctaaaatgtaaaataaataataatttcaccttgtaaaaccaatatataaattactattaatatttttaaataattattttttcacagaaagaaaattaccatccgaaaaaatatttagatcaattcctgttatttaaaaatgaccaatttaaataattttatagcttacttacatatgaaataaatatatttattaataacaatattagttttcacactatatatcatgacacattaacattatattttatgaataaataaagcattatttcgaatataaaaattatctatattttcgctggaaatacgcataataagctaattattcatatacccgttatctttcaagttgcctctttgttggctgcactcactcacctaggtcacatagttaccctatgctcccggggattcgctcccttgtcgtcgcgatccatcttgaaatccatagggtatagctcagaccaaacctgacagccaccagcataaaataaccgataactgtcagaccaaatctaaaacaatccattgtgaaacttcaacaactattcaaattcaaaatggcgcatgacctgattaaagggcatcagctacagcattaacttgtgctgacaggctctccaaaccaccgccagacaaataccacagatcagacttcagataagtaattttgccattcttgtacgctgaagtagatttcactttatcatcttcaaacttcgctttatctagcttaccagcaccaattgcttcactgcggtcaataattaaaattacatctggattagcttgagcaatcatgtcagaagtcactacaacgcgtttggttttatcttcaccagcaggaatagctaattccgctttctgtgccttaaccacgtcatacacgacactctggttattcagcattagtttatctgcgttatgtaacaatactaaaacttttgcatcagcagatttagctttatcctgagctttaacaatggttttctccaactcaacaatttggtctttcacttcactctgtttactaaataattcacctaataatgttatgttactttcaaccgaaaccagataatttttgctatcagttcccaaattaattgtcggtgctatttttgacagattttcatagaaagaaccttgacggccggtaataacgatcaaatcaggtttaagctgcgccagtttttccagattaggctctttcattcctcctgcattttctacctctttaggtaagctattacggagatattcaggcgtattacctgtaggtaatgccacaaccctatctgataaacctaatttaactaatgaatcataagtgccgaaatcaaatgaaacaactttctgaggattttttttgacctcagtttcaccggaaaggtgcttaactataaccttatcatcagcctgagctgtaacaacatttggtgtaaatacagcagatttctgactaaatgcggaatggcttgcaacagcaaataacgataccagaacgacagggatgatctttttcatatattgcactccaagaaagaatatttagtaagcatttgcattctaggtagcgaaaaaaatatgtcaatctaaataagaatcaatttcaaattgattcttatttgtgattattagcaactatttaatagaattcagtaattcaattcgttgttgctcaaggccactgaccttaccgcaaacctctttgccaaaacgctggaaatcttcctcctgagtccgccattcagctttcaaattattctgcaatccccccaaactaccaagcaaagattgtagtgcctgattattatcaccattcaggctaaattgtttattgccaatctcattaatactgtcctgtaatactccaccaagactttgctcaattaagctacggctatctttttcaaccagcttaatcgcttgatggtggaatgccataccatcagaacgagtttcaataattcggtttatttgctgattaagccctgactcaagatcggacaaccgatgacgcacattgctatccttgccgatagtctctactactactttatccaaggatttacgcgccgttatcagatgttttccggtttcttgtttaatccaaggcaaatcctgccgcaaagcccgctgatatcgctgtgctttctgacgctgttctgtatttaaacttaagttcttaccatcacgaattactgaaccatcaggtgaaatctggagattgccacttgcccccacaacttgaactgattgagaagtaataataatgtcattctgtggatttacctggcattcataaccagcttgagtctgagcaacaaatagcaaagatgcagcaatgataattttgcgtaacatgttttctcctaagaaaatcacctgagaattaaaaaatggattgagagttaaaaaacggatcgcccaacacgatcagctaacaattctagggcagcacaaccggccaaagagttccccgatcgatccaattccggtgaccaaacagtaacagtaaactctcccggcacgacacacacgatcccaccaccaacgcccgattttcctggcataccaatcctgaatgcaaattcaccggaaccatcatacataccacaggtcatcatcagtgcattaatctgccgggcctgacgaggactaaggatttgctgctcagaacctatcgtactcccttgattcgccaaataaatgaaacatttagcaagctcaatacagttcattttcaaagcgcaataatgaaaataagtttgcagtaccgcgagcacatcgttatcgaaattaccgaaggatttcatcagataggcaatcgctgcattgcggtgagaatgttccatttcagaacgggcaactttgctgtcgtaacaaatatcaggacaaccagcaagtttgcgcaccacttccagcatacgctgtttaggtgcactcaatcgcgactgcaacatgtcacagacaattaatgcacccgcgttaacaaaagggttacggggtttgcctttttccagttccaactgaactaatgagttaaatggctgaccagaaggttcctgcccgacccgctgccagatctcttgttcctgataacgtgtcatggctaaagtcagacttaatattttagaaatagattgaatcgaaaaacgcttctcagcatctcctgcatgaaatatctgcccatcaatagtacagatagctattgccaagttatcagcaggaacctccgccagtgcaggaatataatttgccactttcccttggccaatcaggggacgaacttgtcgcaaaatatccgacaataacgtattagagaacgttgtactcactgattttactccagacaggggcactaattaatcaccagctacccctgttgtgattcatgcaagatattttatagattaatcaatcccaccaaacatcaaacaattcagaggtcatgacatcttccataccgcgatctttcagccatttttcaaccaattggcggtgttcttctgtacacataccaattttttgcaaacagattaagccttcccaatccagataaccgctggcatccaatgctaagccattggattcaatcagctcatcaataaatgcatcaacagtgctatcgataacatctatcggtgtattagacgggaaattccacttaacagaaaaacccaactctttaaattcatcaatatgcatctttttacgcaaacgacgactgcggtttttagccattacttaatcctcttaaacatgatgtcccatacgccatgccccaaccgctgaccgcgcaattcaaatttcgttatcgggcgtgaagatggacgcggcacataatcaccattttcggacaaattaaggtaattatctacgccattcatcacttccaacatatgctcagcatatggctgccagtcagtcgccatatggaatacgccccctactttcaacttgctttttatcagttccgcaaatggtggctgtacaatcctgcgtttattatgacgtactttatgccacggatccggaaagaaaagctggaccatttccaaacgattatccgggatcatgttttccagcacttcaatcgcatcatggcacatcacccgcaagttaccgatattttcatcttcagcggaagccagacaagcaccgacaccaggcacatgaacttcaattccaagaaagtctttttctggattctgacttgccattgtgacaagtgatgcccccataccaaagccaatttccagcaccacaggggcttctcgcccaaaaagtgctcccagctccagtttttctgcctgatactcaacacctatttttggccagagattatcaagcgcttgttgctgacgattagttaaccggccctgacgacgaacaaaactcctaacacggcgcaacgccctgccattttcatcaaattccggcgaaattacgttatttatcatggtatttctgtcagttttaaaggcatttattcagccgttcatggctgctttaccagcaaaccacctatccccgtcatctttcaagttgcctatttttgttggctgcattcactcaccccggtcacatcgttatccatgctcccgggggttcgttcccttgccgtcgcaatgcatcttgaaatccatagggtataaaagagagcgcattatccaaagatgggcgattttagcaagtccgatagtgataagtacaattttaatactaaattgcgtagcactgcgaaaacaaagttccggtttacagcgaggttacactatgttgcaatcctattcacgaaacactgattttccctaaagacaattatccaaatgatggaagcaaagcaattctccacagtggtactggattggtaccatcgttacggtcgtaaaaccctgccttggcaattggaaaagacctcttaccacgtctggctttcagaagtgatgttgcaacaaactcaggttgcgacggtcattccctattttcagcgctttatttcacgttttcccgatataacttcacttgccgcagccccccttgatgaagtccttcatttatggaccggccttggttactacgctcgcgctcgtaatttacataaagcagcacagcaggttgtggagcggcaccaaggtaaattcccgacaacttttgaagatgttgtcgccctacctggcgttggtcgttcgacagcaggtgcaatcctttcactttctcaaggtaaacatttcccaattcttgatggcaacgttaaacgggtattggcccgctgttatgccgtggaaggttggccgggtaaaaaagaggttgaaagctgcctctggcaaatcagcaccaatgtaacgccagcgcaagaggtagaatattttaatcaggcgatgatggacttaggcgcaatggtttgcactcgcagcaagccgaaatgtgaaatctgcccattaaatcaaggatgtatcgcttacgctaaccatagctggacaaaatatcccggtaaaaaacctaaacagagcattcctgaaaaaacagcttatttcttgctgatgcaaaataatgattctgtctggctagaacagcgcccaccaacggggatctggggtggtttgtttgcgtttcctcagtttgagagcatggatttactaaatggctggttagaacaatcaggcatttctcacagtaaacacgaacaactcaccgcattccgccacacatttagccattttcatctagatattgtgccgataaaaataaatattttatctttcactacctgcatggatgaaaataaaggactttggtataacttacagcaacccgcaactgttgggctggcagcaccagttgaatatctattacaacaactgggctgaatcccctacccactattttgaggatttattatgaacagaactgttttttgtactttcttacaacgcgaagccgaagggctggattttcagctttatccgggcgaattgggcaaacgcattttcaatgaaatttccaaagaagcgtggagacaatggatgagcaaacaaaccatgctgatcaatgagaaaaaactcagcaccatgaacccggaagatcgtaaattgcttgaacaggaaatgactaaattcctgttcgaaggtcatgatattcaaattgatggatataccccaccagaaaaataatatttagctttcatcagagcccgtggctctgatgttgtattcaacaccagatggcaatgtaagatgaaaaaactgttagcgttgtttgttattgccccaattcttatttcctgtaccagcaacaaaaatagtgaataccgcgaagaatatataaaagataccaatggttttgatattttgatgggccagtttgctcataacattgagaacatttgggggttgcatgaagtattaattgcaggcccgaaggattacgttaaatataccgatcaataccggacccgcagccatatcaattttgaagctggaacgatcacaattgaaacaatttctccaattgaccctacaacctatttacgcaaggccattatcacgaccttattaatgggtgatgatccaggttcagttgatctttattctgatactaacgatattcagatcagtaaagaacctttcctttatggacaagttatggacaataatggccaaccgattcgttgggaatggcgagcaacacactttgcagattatctgattgccaataaattacaaaaacgccaatccggtttacatgtcatttggtctgtcactatacaactggtaccaaaccatttggacaaacgtgctcataaatatctgccactgattcgtcaagcttccattaaatatggcatagacgaatccctgattttggccattatgcaaatagaatccagcttcaacccctatgcagtcagccgttctgatgcacttggattgatgcaagttgtacaacatactgctggccgtgatgtttttaaaatgaaaggtaaatcagggcaaccgagccgtagttatctatttgatccagaaaataacatcgatgccggcactgcatatttatcgatattacaaaacagttatctggttgacatcactaatgcaacatctcgccgctacgcagtaataacggcttacaacggtggtgcaggtagtgtattacgggtattttccagcgataagaaaaaagcggctcaaattattaataaaatggctccgggtgatgtttatgaaaccctgacaaccaaacatccatcggcagaatcacgtcgttatctgatgaaagtcaatactgcccagaaaggctatcatcattaagacattaaaatattaagaaaataacggagagcaacttttctactctccgttattattttgcttatatttctagctaatcgaataatttcaaagcataaatcactatttccaaagaaatctattgacgggctctaccgaatacggtttaatgcgccccgttgcccggatagctcagtcggtagagcagaggattgaaaatcctcgtgtcggtggttcgattccgcctccgggcaccattcaaagtgcgcttgttgggagataaaaacttaacgggcgaccaatacaagaacccgaatgtatgactttggctagtttagcttttcagtatttcgatattgaactgaacataagggttaccaagctaggatgcctaagaacttaggtgtccttttcgtgctttaatgcaatacttacaagttctattgcagctgtcaagccatccaaaccaaaatcaatgaattaattaacacgatgttgtatgttggttactcaactttcctcattgatcagaagaaatttaattatgagtgattgtatcagctcaaaaaaattccctatcttgcgacagggaatgatttatgtagaaaaagacagactcaggcaacagcgggaatattctgttttatctgattaatacttcgcctctctctggttcaacatcgatataaagcattaattcacgctccagcgcacgcccggcaatatccagattgatatcaatatattccatcgtcgtggcaatactgcgatggcccagtaatccgcgcaccatttgcaaattacgatcaggcgctttcatcagttcagttgccaaagtatgccggaaacggtgggggcccacatcaaatccacactcctttgacaaacgacgaaagaatgactttatcgtctgtaattgatcagtttcacttcctctgtctgttttggcggtaaaatagttcacacagaacaggggatcactgggttttgccccagcggcttgcgcacgttccagcaaaatctccagccgcggatacaaccatttcaccaccggcacctggtgttcataatggttcttactcccctcagagcaaagaataatccggcgctcatccaggtcaatatccccgagccggatatgtaataactgattttgccgcatcccggtataacgcaacgtatccaataccgtcagccagtaccaggtcggatataatgcacagcgggcacgatgattatcccctgtccgtcgttcccgctcttcaaattgccccatcgtgagatacaaggttgtcagttgttttttggtcaatgttttctttttatttttgttctcattaacctctacaccaataaatgggttttccgtttggggcagtattttttcttctatcgccaaattaaacactgaccgcatatgcgcaatcttactgttccaggtcacgcctttcagtccgcgctgatgcaatacatatctgcgccacgccaggacctgctgtcgggttacctgagcaggccgattgtcggcacctgcaaacacctggaatgtattcaccaccttgcgataactcgactcagtagccggtcgcaagattttggcaaaaaaatattcatccagcaggttatcccaggtcatactgtccatctctacttcctcacttcatcaatttaaaaacccattgcggggcgcgaaaaataacgcatggttattataacacattgttattaaagatactttctcaggaaatcattagaaaagggctatcctcgggtacaggactaccacggtaaagcaaagtacttttgattaagtagccatgaacacgttgataggagccaatccgatcggcagaatcataaagatgacaacaacaaaaacactttccactacttattcgatgtcgtcccagccgctcaaatgcggtttgtacccgtttccatttttggctaacctctttgccatcagcctgttttttctcactaagaaactgaaagaaaatagccggcgcactcacaaacacaaagccgccaaccaaatgtatccgggctttcggcgtattaatactcatacccccatgcattaagccaacggacaaccagtcccagaactgctctccaatacaggatgtctcaatagcattttcatgattctgccatgttgtctgaacagcgtgttgtgaaggtattgacgtgtatggcggtgcgatttccgcttcactcaccataacttgttctgtgactgtggtgacaacattcatccccattaatgacaatagctgctgcgtgcttccatccggttgcctccccttctccggcgtgactgtcatagcagtaaagagaggctcatcaacagacttcacggctgatgaaacaattttagtcatcgtgttatcttcctgccgtatctgagagggcagaacattttccattgcggttgataaaggcgtagcagaaacatcgggatttcctgaaacaataacttgcggtgatgcagccatgacagataatacttctgatattgtcggtgcaccggctttattcaaagcttctgtcattatctgatttattgcgttatctttcttcatctcaccggatagaatacaaaacagcgaaggcaaggcatcaggtaccgacgccagccaggtcaatgccttagccggcagcaatcgcccggcaagtaacaccccaaaatgacaggcaaccatcgtctccactgaggaagttttgaaccggaaacgatacgccccctgcggcacagccagccctgggtaccaaggttggccttcatccagttcgccctcaaactttgccaaaacaggtaaaaaatgaaataacgcagcgtaaaacaccaccgtgttccatatcacactttgtgctgcctgcgtctcaggtgccacacccggcggtaacatctgccctttcgccagacgtacggcaaatgcagtacattgcaacgtcacatcaattaatccgcccaaacgggcataaggtccctgcggtgccgccggaagttgttgcatcaatgccacacactcatgtaatggggccagccacagcgtctgatagcgtgttttggataatgtgctattgtcccacagacactgtaaatattgtcgtcgccgggaagtatccagcaatagcctggactcagacggcaaaaagtagcctgctttgaccgtttgtgggatggcggcggattgtggaagtggcttttttcctgtggatgctcctgccagcaggattttaatttttttcaacacgattaatctcccctatttttcctaaaaccctaatacatcctctgacagggacaaggcaaaactctttttccgggaataaaaattaatcgatgaaaacagcacgcaatgattcaaacgtttccaattcagtcacgggtaaacgaagcgtgtatccggttatttcgttgaattcgctacgataagtacaaaaggcaagaactttattcaatgatggatcatgcaagaaaggattaaagaggaaaatagaatgtgtccagtgcatctgggaagcactatcgattccgactaaaacacgtcagggatgaacccaataacctcagttggtttattttgcctctccgtcctgttggataaaaactccggcccaagagccggaattggcttaatcaagtgtctcaaaccgtttgaacctcatactgctgacgatttttcctgagacgacaaggccagtttcccagccaatgtaccggagtatacatgacccgatgacgttcattcgtcagggcatcacctatcaccacctccccaggtatccccaatagagaaagctggatataggccatcgaagccgccacgacatcaatatccacacaggatacccacatatgctgagcaggattataacctgacattttcaacacttccgctgccgcaataaccatacaacccgcaccacaagctggctcatataaggtgaaaaagggctgcttcgttaagcgttgctcgacgtcgctcaactgcattttcgccattaccaagctgatgggccagggagtaaagaattgcttcagatgtttgttgccgagattcaattgcataaaaacaccgccaagaaaatcatgaggttcaaattccaatcccatcatgacatgttcaagcagttgagaaaaccggctagcatcttccggcttatagtgtttgatgatttgcagatatccttgctccagcttactgtccgggcagactgcattatgcagactaattgccgcacattgtacaaaatcatcgaatactcggttacgataataataacgggcagtttcattaaacaaggtaataaacgcttttttatgatcaataaaaacagacaaaacatgctcctggaaaacggggaacatgtcccactaagggatatattccccttgtgggtaaatcgccggcgtaatatccgccggcagtagcgttatcagacactcaggcaaacctgagttttttatgtcaattcaccccaaggaatttccctacggaataacactgtcagtgcactaacatccgtcatgtgaaatattgccgagaatgtaggccggtcctatcaccttacggacaccgtcttcctcaccaaattccagttcatcaatgctaacctcttccctctgcccattccgatatgtatcgtaaccacaaaaactacgggcacctttaaaataatgggtgatatggcagtgatattgcctggataaaggcgctatgattttttcataccacggctccctgggtgttttgtcaaaatgcccggtcagactgccatcatcattgtgcttccaggctatgtcataacctcgcggctgcgccataccgtacaatcggatatacaactcatgagttgtctcgtgatcccttaacaatccgccgcaaaatccattgatttcactcgcaagatgggtcggtatcagcagaaacaagtcacaaggcaccgtctctgtcagccgatcatcaagatgagaccacagcatttccgtgtcacgttctccgttccaatcaaccaaaccgaaccagtcacaggacttttggttaaataaagccatgatggttttctgcgctgtcgggagcaacgtctcccattttcgctcggccagaccactttgttggtatagcctgtcaatctgttggctggtgacttcatcaagcgcaacattctcttttaacaaggccagccattgctcaaacgcccggttttccggtgagtctccccctgttcctttcgctaccagcgccggataaagcaggaaatctgtcgtttcagtcggttgtaggagaccgacacagcccgcgacaaacagcttaatactttgatggatagcctgtccgtaatagggaattctgtctcccaatccccattgtcgcagggcatccagttggtcaggttgacccgtgatatgcaaacgattagcgtaccacttcggcatagtaaaaaatcctctttttttacctgaaacagggcataccctgtggaggtaatgcccccacaggccagtgataagttcagcgatgtgaaaaaaggctatcccgctttcggatagccctatccgaattatttatagccggacagccggtctccacaattttatggcctgtacatcagggcgccttctttttccaaacgccgcgataatcctgcccgtcatcacccggtacaaatcaggccggaaacgcctgccatgacgacgggcgactttgttcttgcggacaatttttggggctgttttggtcttaatctttttcatcagtaacgctccgaaataaaaacgggcattatcccctgaggggaaataacgcccgtcagggtgaaaacaactgccggcagcccggcaatcaggggtaaaattgtgtgataatttgtgtggctgtcagcgtcaccttcagatcacatttgtcattcagtaaccggttgagtgtagatatggagaaacccagcttttccgcaaaatcatcgccgcccgcttcctcccgggcacgttcataccagccttcgtccttctccggatgataaccgcaagcataagcgacaagatatttgccgttttgcatcgaaccgatatcagacatgatataaatgccctgatccttgaccagcaacacgtcacactgatgggctatcgcttcccgcaacacaggtttcagatctttagccttaaaaagtaacatcgtcattctcctgaggagaaacgttcccattgagggaacatgtcccccaatgggttaaagtttagttatgccgccagcctctgtactggcgaagacaggctcactgaacgggttttcagcccaaactgctcatctacccatgtgattgcctcatccaccacatcccgataatccttgagtgtcgggttattaacattttcaatgtctacatctgatcgaaaactctctattacacaaccatttttgtataccacatcaacctggaactggactggcgtcatgagtccatcagagacctcatcgatatagtcttcgagataccctgactcaaattcctctgcgtcaatattgtgtaaatcctgtggccccatgaagacatcaatgtaaccgacagagaaggaaaaacgccgtatcaaacggggttcaacctgtaagtgacgaagaaattggcccagacgttcaaaacaatacagacacgtttctgtcaactgcttatccaaatagtccataaaacgtgtccagtacttttgtgttttgctgaactgttccagcccaatttgttcatcttccggtagattatcctgcgccgtcagacgcaaaaattcctctgccgttagattcagtaacacggctgtatccggccggataagggtatccacacgaccactgctttccggatgggtataaggcatcagcaacggatcctgataaacatgagatatcgcatccatcccccgtatccataacgtcaggatacgttcactatttctgcatctagcccggtttgccggatcctcagataagctgtccaaaagatgagtcatgacaggcaaaagtaactctttggtaaactttatatgggtattgacgtagtctccctggctttcattaaacagacagaaaatagcgtcgtcatccagctccagccccattcgttctacgaattgatgccggatataaaaacgtaataaagacataagggaaatctcgtgattgacggggttccccctgtaggggatatcccctatcgggttaatgtgatgccacacaatagtgacttgaattaaagatatgtgtcagctggccttgcgcatcgctatttcatcttcagcttcctgacgctgacgtttaaattgccagaatcctaaatggtacattggcgtcaccattttctgagacatgacatgagtgagtgaattgcccaccgtgaccacggccgggacacccagcaacgacagttggatataagtcatcatcgcggcaaccgggtcaatatcgacacaaaacgccaacatctgttgctgaggattaaaccccgcttccagcatggtctgatacatcgcaataatcatcccgccggcgccacaatccggatcagacactgtgatatattcatgctctccggatcccagcctcgccaagccctcagcgagcttcattctggccatcatatgactgaccggaaacggcgtaaaatactggccaacctggtcattacctaattccagcgccatgaaaacagctcccagaaaatcaccggcttcatactccagccccataataacttcactcagcaaacgactcagccggaatgcatcttcacgggaataacgtttaacccgctgcatatagtccgcttcaaattcatcattttgcaacaacgcgttgtacagtgaacaggctgccatatgcacaaaatcacagaacacctgccagcgattttcatgcggcgcaatctggttaaacagtctgataaaagcctgtttatgtggattcggttcccggtaagtggccgccaacggcagttccacaacattatcgtcagacggatcattatcttcatcttcacagctacgatcagacgccaccggcggtaacagcaaccgttcagattgtgatgatctgtccggttcacaagtatcagccggttctgtcgccgggatccgagaatagttcagacacgatggctggctggagaataacgccaatgcctcactggcctgccccaattcttccggaaacaacctgccttctggctggtcacgccgttcccagtgatatattcgggctaaagcactgacagccatcagcggtgtgatgccctcatcaatatggcgctgaaccacctcatcatattccagcatggtgtcattcagcggcagaccatagtgctcactgagcaatacggcagccatctgctgccacaattccacctggcttggtaactgctgtcgccggtcttgcaaataatccattgcacggcgggcatcattagcagcctgaaataaccaccacggatctgagcccaaagcatgttcccgtagtatcgtattatcaggatataccaggttaccccggacacccgtcaatgcagccaaaaacgcggtgcctagtgctgtcacccattgttcccgactttcatcccactcacttcgggctgtcaggccaaaacggtttaaccgggacggatggccagaggcatgaaccagttgatgcaataaatcatgccagtattgtgtactttcggcatagtcctgacagccaggcagttcaatacggtcatgcaacgaccggtaaacgggcacaatgcctgaccgatgaaccaccgggatcccactggccgtcaccagttgctgaacagcggcaaaaccgggagccggacgggggggtaaagggcaacctggttggagctctgccggcagtccttcacattgttccagattaatcacacgcatcagcgacattgaaggccggtaacggacgatggttgtcggtttttcacctttgaccacccatccgcctaacgctcttaaatcatcaccggttaaccagcgattagatatcagctgccgctgcaacatagtttgccagagcaacagcacattgataccgctaaacggttgtccggtcagcgcatgctgcggcaaaccgtactcactggccgcttgccaaggctgctgccagagcacccctccactttccaggctgtctgtaagacgtcgggttattaaccggcagatatcgtccggtaggtaagaaatggtcatcatctttcctgtctaaaattaaggaagagaccattccacagggagtcgtctctcccctggagataaataattagcgcatgaaataatgagctattctggccggtaacgcagtcagctcgtgataaactgctgacaaatcaacctcataagcatgaagaatcaaatatactcccgtcaccagcgacgtcaatgctatcccggtcaacagccaacgacgacgctgcctgagtttcttctcctttagctgaacctgttgatacaggaacagccccagcgtctgcaactcactgaaccggtgaaattcctcacgccgtaaggcttcacatgcctcatcgtaacgctcaagctcggtcggatgatgacgagcaagaaaacaacggtaaccgtgatttctcagggtgtgatagtgattgtcgaattgcgcctgcaaccactgattaaaccggctacgggtttttttgaatatttccggctcagccagcgcctgcacggacagggactgggacggtgaccgaatgtgttctttagtcgtcattgtactcatagggttaactcctttcgtaaaaaaatgactgacggagttaaccctcacgggtttccccgtcagggtaatcaataaaattaggcgtccaacgcaatcagcaaccgatcagattcatgtttaagccgcagcgcttgccataagggggccttcatgtcgccgtcatacggcaaacagaaaaaaccaaacgtcacctcacacgttcccggctttgctgctgaccaggctttgaatgcctggtaaatcagttgatgaaaccgttctgtttcatattccggcgcagacggataactcaccattcgcaaccagactggctcttcaatcgctacagccggcatcacccaccgggtaacggcagtcaacgtctcattgaccattatgcggcctcatcataagcatgcgataaactacgctgtctcaacaggcgcgttagcatctgttgtgccgaatccaccgcttccgtttcgtcgataaggtaccgctcgccataaaacggctctggactctcctcaccgaaatacagcaactccacacccggtttgtagctgtgtctatctctgaccacaaccggtctcccgcatgacttcgcgtcatcagaaagttgccatttacccgcatacaccgtttgtctccgagcctgggtcatatgagtcaccggtagtctcacctgtcttcggcgtaacaaccaggacatcacatggtaaaacgacagagaaatccaacgaataacgccccaaagtactgtcgcaaagatcattaacatcgttcgtctcctttatccccataacaactggaaaaccagcaacagcacacctaacgtcaggatccccgcaactttgaacagcgttatcatgcccaaaagtttaaggagtgcgtcacgatcccgataatcacactcatcacggatcaaatcgcggataagtgagcgttgtttcggcgttaacatctctgaaaccgacaaggttgtcgtatcagtggggggatgaaaagcaggcattaaccactcctgttaccgggagcctgcccttgacggggacaagccccgggaaatgtaaggaagatgttcatcacgaacatcatacaaagtaaataaatccgtcaggtcaatccctgtcaggatgcctgataagtatcgccagccgaggcaatctccccgacttaactttgcgcccaatcagtgcttcagaccggacagatttcatcaatatttcagttaatcacgataaagtttgcataatatttcctcaaatgtaaaaaatgaggaataacctcatccctcagggaaaggcattccccatcaggaagtggttgatatgagagagacaacagagaactaactctgtccctcggaggtgagatcaccaaatggcaagcctgccaccgtgtgttactaaaaatgcaccttcatcactgtaatcagtgatacccgttttcaaaggataaacgggtgtaccgcccaaaggcaccatctctcaggttacaatggttttatgacgagtcacccaaaggcgtcagtctcagactcgtctgacattggccgttgtccgaaaacaacaagttaacacattgatattaagcccagggctgtttcgattcaagctaaattcaaaagccaattaatcatcactgcactgtttattgtagacacgggcaacataatgtcctcgtccatccccatgccctaaatccattgaaaccatcgcttccgcttcttttcgacttaatcctttcgacagatgataatttatggcctcaacagcataagcataacgcaaactgtgtggcgaagactttccggttaaccccgcttccctgacgatattccggtaacgatcaatggccgaatgtaaattcggtttatcaatcaaacgaccctgatttttattggcatactttattgccgtcctgacggcctggatcactttatcccgctcaaccaccgtcgtgtcacggggacgtcctccttttgtaccaaacactaccctcactctttcatccccacgcaataaggctttttcccacgttcttaatgactttgccgcctgaaccgcttcttctgttcgcagtcccagataacgagaaagttgcatagccgcagcgaccccttcatctttcccccgggccaaaacaagcgtcgtgtgataacgctcatccgaaatcgccatcttagtcccctcccggctggtgccggataatccgagcgcatgattacttaaccgttcgtgatgagggttagctaattgagatcttcccgccatagcgaatatcgcccgaacggccgccatctcattttgtaacgtgcgctttgaaatattctctgactttcggctatcgatatatttttcaatatgattaattttcatattcttaatatcacggatttgaatatttaatatcgccatgctttccgccagacgtttggctattttcattctgtctgaaacggttttaaaactgccgccagcctgacgggccaatgtgactaactgtttactcaactttgacatgcaaacgatttcctttttaacccacacgacaccaccgcttgtaacctgacggaggcaggcaatacaaaacggtattctgaatgtcatctctcaaccccaacggcacggtttgatttgcgcttcctgcggctcgactgatatctgtgcatcggggtggcgaaaggttgagttcttacgaggcaccccagctctctgagctgttcgcggtttacaccgtcctgaccgttgtcagactacctccaacgccagttttcactgacgtcgccatcaatatcgaatcgattgttctccttcttctgaatataaaacgtcaacatgattgtttttcactcaagacgttaaggtggattgcgatcttcaaaccctccgaccggggtactacgtattggtcagaaggtagaagatacagggaaagcttgtattacgtggtttaggatgttgtacgctggcagcgtcacttggttttcgttatcacgccaacaagtgacgccgcccatttcttctggacccaatgcgttgtccgcaaaatatccaataacctgtcgaatctgacaacagtcatccagactactgaacgaaaccacccaggcaagccaatcgtagaaagcaaaatcaacccgcaggttattgtttgaggatactggcaagtcagaaaattgcctgtgaaattgcaccttcatcactattgttagtgatacccgttttcaaaggataaacggatttgccgtccgaagacgccatctctcaggctatgatggcattgagatcagtcacccgaaggcgttcctctcagactacgggaacattaacgatcgcttacgcgataacgaatactgccttaaattaatcaaggtctatttcaacgtcaagaaagcttttcataccgcatagaataatcatttactcttttcaaaaaacgagcaaaatgacaggccgaaccgttaacaaaaagcaaaacaggcatagataaatccgcactggcgatctttgtccctaggattcatgattttttccactctgtgaattaatgacgaacacctgcttctgatgattgtctcccaatccgcaatagcctagcgtcagttctgccaattgactgagctaaaagtcatcatctaatcataaaagatcatttcttatcaaaaattaacgaaaaccgtcatatttcaagtgattcaatactgaaatcaatcattataaatgtgacgcatatcacataataaaaataaaacaataaaattaatttgaaattattaatgttgattattaaatgattaatattaatccattttttatacaattctgttacaaaataatcacattggcctgatttttgctttgtcatataacctcttgtttttgctgctatcttaaccaaccccctattttagttgcccggttgataatcaaccctaaatattgatcgctaagttaaattcgtggttaatactgtttcgacattgtggaatagaaagtcaatgaaaagcagtattttagtcttaacggttttttgtagcgtagtctcaggcagtcaagccgccgacatcgcagatcaacaactcattcatcaacaggcccgtcagcaagccctggaggcgcaattagccccgccgcctgcggaggttcacctgtcggtaccggaaaccggggaatcatccgccttcccggtggaaaccccctgttttcctatcacacatgtagcattggcaggtaccgaaaatttcccgcactggttaccgttccggcgtgtcgcccaacagggcgaaaaccattgcctgggcgataaaggcattagccggctgataacccaattgcaagatcagctcattaatcacggctatgtcaccagccgggttctggttcctccccaggatctgcgtacccaaacgctaaaactggtgatgataccgggcaaaatccggcatatccgctatacccctgacagcgggaaatatatccagcggataaccccctttcccgcgcgtgaaggcaagctactggatttacgggacattgagcagggactggaaaacttgcaacgcttcccgaccgtgcaggcggatatgaacattgtcccggcagagcagccgggggagagcgatattgtgctggactggcgtcagtcccggcattggcgaatcgccacgtatctggatgataccggctccaaaagcaccgggcgttatcagggcggactcaccttctttctggacaacccgctggcgttgagtgatctgttttatctctccggtggacgcgatattcattcatctgccgggaagggcagccaaaacgacacgctctattactccctgccgttcggctactggatggcgagcgtgacggccagtcattacgattatacccagacgatagccgggctgaatcaggcgatccaataccggggcaaaagccaaaacctggcggttcagcttagccgtgttctgcaccgtaacgccgaccagaaaaccctgcttaatggtgaaatttatcgccggacgtcgcgcaattttattgataagaccgaagttgatgttcagcgccgggaaaccgcgggctggaagctggggctgtcccatcatcactttatcggcagcgcgacgctggatactagggtgacttaccagcagggcatgcgctggtttggcgcacaaccggcgccggaagagtaccgcaatgaagggaccgccttacctaaaatcacccaattctcggcgacgcttgccgggccgttaaccttgttttctcagcctttttcttatcaaacccagtatttgcgtcagataagcgccagcccattgacgccccaggatcgcttctcgattggcggtcgctggacggtgcgcggctttgatggcgagctgactttatccgctgatcggggctggtacagccgcaacgaactggactggcaaaccccgctgaaagggcagtcgctgtatctggcaatggattatggcgaagtgggcggccggggcagcgacgcgctgctcggaaaacacctggcggggagcgccctaggctggcgcggcagtctgaaaggggtgagctacgacctgtttgtcggcgtcccgctgtccaaacccgccggtttccaaacctctcccgtcacggccggattcaacctgtattggcagtattaattcaaataacaaaactgccggtgggtagtgttgtgtggagtaaaaatcatgaacaagcagttgtatcgtattatctttaatcaatcccgccagatgtggatggtagtggccgagatagcgcgggccggacggggacgaaccgggcgccgatatcggtgcccctcttcaccacagcatcgttgccgactcactgcgctacggtttggattgttgttagcctttggcgggatttcgctcaccgcgcaggcggcgattgtggccgacggacaggcgccggggcgccagcaaccgaccatcattcgcagcgccaacggcacgccgcaggtcaatatccagacgccgggcgccgatggcgtttcccacaatacctaccgtcagtttgacgtggataaacagggagttatcctcaataacagccatcaagccacgcagacgcaactggggggtatggtcgcgggcaatccgtggttagccaaaggggacgccagcgttattcttaacgaagtcaacagtcgttaccccagtcaactcaatggctggattgaagtcgccgggcataaagccgaggtgattattgccaacccggcgggtatcacctgtaacggttgcgggttcattaactcacatcgcaccacgctcactaccgggcaagctctgatggagcgaggccggctgaaagggtttgatgtcaatcagggggaagtgcggattgacgggcacggcatggacagcacacagcaaagttacaccgatattatcgcccgctccgtcgccatcaacgccaaattacacgcgcaagacctgaaagtgaccaccgggcgcaatattgtggatacggcgcatcagcagatagagaaaaaatcgattgacgatgaaaagcacccggcgtttgcgttggatgtggcggcgctgggcggcatgtatgcccataaaatcaggctgataggcaccgaaacgggggtgggcgtgcataatgccggtaatatcggcgcgtctgccggggaggtccatatcaccgccgatggctgggtagagaaccgcggcaccctcagcagccgggatacgttgcaattaacctcgtctgccgatgtcactaacaccggcaaattgctgtcacaatcggcggtgaatttacagaccaaaggagcactgcgcaatcagggccgggtggaagctcgcggcgataccacggtcaacgcaggcacaatacacagcagccatgacagtgtgtgggccgcgggactggatgataacggcaacactacccgtcccggctcactgactctgaccgcgcagcacgttcaggcgaaggggaaaaatctggccgccgatacgctggctgtccacagtcagcggattgacctgagcgacagccagaccgcagccagccagattcaactcaccgccagtcaagcggggatcagtaccgctcgcgctaccgtcaacgccgaccgtttgacggcgaaaacgccgggccagtttaacaacgacggcggccagttagtggcgaaggaaatccacctgacgaccccggatttatccaaccagcaggggaaaattaaccagaccgggaccggtgaactgacgctccatacacgcaccctgaataaccgtgaggggacagtgttcaatcaggggaaattgaccctcactactgaccggcttaacaaccgtcagggcactattgccagtcagggcgaggacctgcatctgaccgcgcatcaggccgataacaaccaggggacggtgcaattggccggtcagggtcgattatcgctcaacacgcaacggtggctgggtgataagggcaagctgctcaccaatggcgccctgacgatacaggccggtgaactgcaactcaaccaggctgaaactcaggccgggcagataaccgtcaacgccgacaccctgagtcatcaaggcggcgtgatgcaacaacagggcaaagataccctgtccctcaccacccggaagctggataaccagcgcggtacccttgcgggcaacggcaacctgaaccttaaagcaacgaccgtcgataatcgtcacggcaacatcgtggccgccgaaaaaggctcgctgacactggcggtcaaagacacgctggacaatcagtcgggccgggtgttaagcggcgggcagttaaccctgcgcaccggcgatgttgataacaccggcgggataatcgccgcggacggtaaaaccacgctgaccagcgccgagctcactaatactcagggccagattgccggcaatggcgggctggacattcacagtcaacaactgataaaccgcgaggggaccttacaatccgccgacgccctgactctggataccgacgggcagttactggataaccagcagggccatattctcggtgagggcaagacgaccatcaccagtggcccgctggacaatcgccacggtcatcttcaaggcggacagttggctatcgatacccgacacgccgcgctggataaccgggacggcaaattgttatccacggacaccttaaccctgaatactcatcagctcgacaatcgtcacgggcaggtgcaggcggtgggcgacaccacgctcaatgttgacactcaaaccgataacaccggcggccttatccgtggcggtcagcaattgaccctgaacaccgctcatttgattaaccgggaaacgaagcagacggataacgggctggaagcgcaaaacctgacggtcaacgctcaacaggtggacaatactcagggcgctttacgggcagccaaccatctgaaagcgaacatcagccagaccttaaataatactcaggggctggtctctgcgggcaaacagctcattctcaaaagcgaggcccggcaaccgcatctggcgattaataaccggcaaggcacgctgattgccggggagcacgccacgattaacgcccatgctctgagcggtgacggccaactgttatcgcagggcgatatggcggtcactttaaccgaggattttcatcataccggcaacaccgcggccaatggcaatctgaccctgaaaacaaccggcaatctcctcaacgaccgccagataaaagccggtcgggcgctgcatcttgacactcacaatctcaccaatagcgcctccggtgaaatcagcgccgggcaaacgcaaatccaggctcacgataccctgagcaacaccggactgattgacggcggtttgactcatctcacggccaacaccctgaacaataccggcaccgggcgcatttacggggaccagctggccctccagacgggcacattgaataacaccgctcaggacggcaaagccgcggtcattgcggcacgggaccggctggacatcggcaccgcaacgctcaataaccagcatcatgcgcagatttacagcgtgggcgacatgcgcatcggcggccagttggataataccctgacggcctccggtcaagcccatgagctcaataaccacgcagcgacgattgaagccgggcgccacttgaagattaatgccgaccagattaacaacaccaacgccgggttggtcactcaggtcgtcgaaacggaaaagtctcagcatcacgatgcagtactcagcggccagaccacccgttacgactggtcacaggtggacacttcccaccgcaataaatacaaagtgcacgatgccatcatgccggatggcagccgcagtaatgacttttacgaatatcagtacacccggaccgtcaaggaaactcaggttaaacagagtgaccccggtaaaattctggccgggggtaatatcacgctcaacagtgcgcaggtcactaatcacgacagccagattgtcgccagcggggcgctggatggagaaatcggcgaactgcacaatattgccactcagggcgaacggattaccaccgataaaggtcgccaaactcactggtacgccaaaaagaccaaacacaaaaagttcgggttcggtggcaccaaaacctcgcaggggaaaagccgcagcaattatgacccggcccccgtaatagaaaccatcgacctgaaaacgctggcctggcaggagaatacccgtccacagggcaccgatatcacgattacagaccgacagaccggtcagatacattctgcccccacggcggttacgccggtgaacggtatcaaaaatcagccactggtattgcccccggagaccgtcaaagggcaaacagtcgatccggtgatacgcgtggtgacacccgatacgcgtttgccgaataacagcctgtataccgtgcaaccgggcagcgacagccactatctggtggagaccgacccgaaattcacccagtacaaacagtggctgggctcggactatatgcggcaacagttaacgcacgacccggcgctggttcacaaacgcctgggcgatgggttctacgaacagcggctggtgcgcgaccaaatcacccaactgaccggtcagcgctatctgccgggctacaacaacgacgaagcgcagtttaaagcgctgatggatgccggtgtcgcctttggcaaacagcaacagttaacgccgggtgtggcgctgagtccggcacagatggcgctgctgacctcagatattatctggctgactaaccaaaccgtgaccctgccggatggcactaccgaggtggtgactgtgccgcaggtttacgcgcgcgtccgtcagggcgacctgagcagtgatggcgccttgctggccgggaataccgtggcgctcaacagtcagggcgatatcaccaacagcggcacgatgagcgggcgtgacgtcactcaactgacggccaacaatttgaccaacagcggctttattcgcggcggcaaagtggatttagcggcccaacagacgctcactaaccggggcggccagattcagggggatgatcgggtgactctgaaaggccgggatatcaccagcgcatcgaccgtgcgcggggatgaagctaaccgctggctggaccgtccggcaggcatctatgtgcagaacgataagggcaccttatcgctgagcgccattaacaatgtccaattaaccgccagtgacgtcaagaatgcgggtaaagacggtcacaccgagataacggcaggccataacctgacgctggacgccttaagcacgcgccgcacagagcaaggcgactgggggaaagataacacccgccgtctgacccaacaacaagatatcggcagccagataaccggcgccggtgaggtgaccctgcaagccgggcaggatttgaacgccaccgccgcccacgtcaacgccggtcaacaactgacggcgcaggccggaaataatctgacgctgaccaccgggacggcctcatccgacttagtggagcacagcaagcaaaccagcaaaggctggctgtcgaaatcgtcagtggaaacccacgatgaagtgcatgaccggcaggcgctcagtaccacattcagtggcgataaagtgactctacaggccggtaaagacctcaatatccgcggcagcaatgtcgccggtacgcaggatgtcagcctgaacgccggtcatcagctcaccgtcaccaccgcagccgaagcgcacgatgaaacccatttgcgacaggagaaaaaatccggcctgatggggaccagcggcatgggtttcaccgttggcaaagccagccagaaagtcaccaccgacagtgacagccagctgagcaaaggcagcacggtcggcagcagccagggcaatgtcacccttaacgcgggagaacagctccgggttcacggcagtgaggtgattgccggtaaagacctgacgctgaccggtcaacaggttgatatcaccagcgcggaaaatcgccatcacaccacgacaaaaaccgaacaaaaacagagcggcttaaccgtggcgctgagtggcgccgcaggcggggccgtcaacagcgcggtgcaaacagccagagccgcccgcactgaaagtgacccgcgagtaaaagccctgcaaaacactaaagccgccctcagcggagtgcaagcggcgcaggctggccgactggcggaggctcagggcagtgacgacaaaggcaataataatctggccggggtgagcctgtcttatggccgccagtcttcccgttcagaacagcagcaccgccaaaccacccaacagggcagccacctcaccgccggggataacctcaccataaccgccaaaggggatggcaaaggcgcatcaggccagaatggcgatatccgtattcagggcagccagttacaggcgggtaaagacctgcaactcaatgcgaatcgggatattcagctctcatccagccagaacaccgagcagacgaccggcaaaaacagcagccacggccgctcgctgggcatgggcctgaccgtgggaccgggaggcaccggtctgaatgtctcggccaatgtcagtcggggcaacggtcgcgaaaacggcaacggcgtcagtcatactaacaccacattacaggcgggacagagcgtcgggctgaacagtggccgggacacgacgctgaaaggcgctcaggtcagcggcgaacagattaccgccgacgtgaaacgtcatttgatcctcagcagcgagcaggacagccagcgctatgacagccaacaacagaatgccagcgcgggcgtcagtgccaccgtgggtcccctcactaacggtaccgcaagcctcaatgccagccgcaataaactgcacagcaactatgacagcgtgcaggagcagaccgggctgtttgctggcaaaggcggctatcaggttaacgtcggtgaccacacccaattggacggcgcggtgatagcgagtcacgctgacaaaaccaaaaacaccctgaacaccgggacgctgggctttaaagatattaaaaatcaagcggattttactgttgagcagcaaagtgcgggcgtcagcctgggccaaccgaccgccggtcaggtcctgaataatctggcggtcaatgggctgagtggttccaataaccagggccatgacagcaccaccacgcacgctgccgtcagtgacggcaacctgattatccgggataaagcgcaccagactcaggatgtcgcgaacttaagtcgcgataccgataatgccgcgaatgtcctgagtccgatatttgataaggaaaaagaacagcaacggctgaaacaggcgcaactgattggcgaactcagcgcccagatgaccgagatagcccgtacggaagggaaaattatcgccaccaaagcggcgaaagcgaagctggaccatatcagtgagccggacaaagcggcagccagaaaaaaattggtcgacagtggcaatccacacccgactgcggcggatattaataagcaagtttatgacaccgcttacacacaggcgctgaatgactcgggctttgggactggcggaacctatcagaaagcgttacaggcagccacggcagccattcagggcttggcagggaacaacctcggtcaggcgctggccgggggcgcttcaccgtatctggccggtgtgataaaagcgctgacgacagatccacaaactcataaagtggatattgccaccaatacgctggcccatgcgattttaggcgcggtaacggcagaggtcagtggcaataatgccttgtcaggcgcagccggtgccgcatcgggtgaactggccgctcaagttctgataaagcaactttacggcgacggcaccaaagtcagtgaattaacggaggagcagaagcaaactatcagcaccctttccaccctggcagcaggattggcaggcggcattgccggtgactccaccgccagtgccctcactggggcgcaggccgggaagaatgcggtggagaataatgcgctggcctcgcgaaatctgggtgattgccgcacgctgtcaccggaagcgtgcggcaaggctaaggagctgagccagcgcattctggataaaggcttgccgtcagtggaggacatgcgcggtaaactggcatcatgtcaggatgacagctgccgtaaaggagtctggacagagtaccggcaggccagtgatgcgaccatcaacagcctgaaacagatggcgttgaatggtgagttgagtcgtgaagaactggcattcatcaaccatgaactgggcaaggagctggccgtctcaggttaccgtgccaatgacaagatagggcgttcagagcagagcagctggttaaatggcggcagcggacccctctccgggttttttaacacggaactgcgtcaaaaagagctggaaaaatcgggcttgtccaaagcggatgcggcgcagtacgtgaaggaagagcagcgcaacctgttgttgctggagactgcggtcggggctattgggggagcagccagtaataagatacaggcgaagccatcatctgtatcatcaaaaaataatgttgataaaagcgttccggcggaagctactcaagtacagcctaaccaaacggctaataaatcaagtacaacaacacagacagatgtcgcaaaatactttggccaggacagaaaatattggtcggctgagccagttccctttaagggaaataaggtttatcaacgaaatgacttgtttgatccaagccgtattgatcctaaatcaggtaagacaaacgtagagcttatgagagctggtagagcacctatcggtaatgatggaaaacctgtcaatttacatcatatgttacaaaagcaggatggacctatagctgaggtaacgcagagttttcataaggataatcataaggtcatacatataaatgataacagtatcccctcaggtattaaccgctcggagtttaataagtggcgttctgattattggaaacaacgagctaacgattttaaatagggttacgtatgaatactaaacttaatgatgttattgaagaaatcgaacgcttatcagatggtcaaagaaatgatgttgatttgccagatgatgaattaatttctcagtatgaaaaagaaattggtttcgaattttcaaatgattataaagaggttttgaaaaaaataagtaatatattctacggaactatagatttgttatctgttacccgtgataaaaaatattatggagaactgtcacaagcgttaagcgatgcaagagagcaagggctacctgaaaatttgctcccgatctgtgaagataatggcagttattattgtattgattatgacggaaaaattaagtactggacgcttgatggttataacgaggaaagttggcctgatcttgctagctggataaagcaagtatggatagaaggtaattagtcatgctaaagatcccagcgcttggctgggatcttttttgagccgtcagttgtactcaacgagccggataatcaactgcccgtgctcaacactgacctgtactggctgtccggtggcaaagcccgcttcttccagccagttgcctttaagatgcaaactggggtgctggctgtaatagcgggtcataccggtgctgcggtcttcgtggcgggtgcgggcataccccaccttatagctgcgccgggcttttgaaatcgctaaatctgcattacaatcgcggttagccataaatcaactcctgcttagttggttgtggttagcggttgtggcaggttgccgcctgctccatccgcgtaaaaaaatcctttctcttagctgtctgtcttttactgttgtgcctgtgcaattaccgcatccagcatctctgaaaccagcttctgcttagcgcggggcaactggctgataatctgtatctgttgctcaagccgtgaagccggtccccgtttacgggggatcgtgtcgctctcttcgccgaacagttcttcgagcgagacggaaagtaactttgctatctcaggcagaacagagatctggatccgtcttctgcccgcttcccatgactgaaccgcttgctgagaaacgttcagtgcctgagccagttgcgcttgtgtaagtccggcgtgtttacgcagggcagaaatccgctgacctaacgtcatcataaatacctgttcttcactactgatggaggcggccatagtcgttgttaccgatgtaaaaagtgactgaatgaccctaatctacaacatgttttacatcttactgttgtaaatactaccagctgtagtatatgattgtcgagttatttttatccaaaccctattgacaggtttttacaggaggtcactgatgacccgcgttcccgataccgatttagcccgcttaaagcaaaccgtctcgttactggggctggcgcgtaagcaaggccgtccgatgaaaaaacgcggtgaggattatgtgctgcgctgtccgttccataacgagaaaacgccctcaatggtgatatcgcctgctaagaacctgtatcactgctttggctgtggcgcagcgggatcggtgctggactgggtgatacaaacggaaggggtgacgctgaaaatcgctatccgccggctgcgggagctggccgggttgccggatatggacaatgcggttgtggccgcttcttctttagccgccccgccgggatcacaggcggcacctctgccgcgcccgaaactggccgacctggacgatgacgggcaggcgctgttgcatcaggtgattgatttttatcatcagcacttactggcgtcaccggaagccaaagcctggctggagcggcgcgggctgaaccatcctgaactggtcagccactttaaactggggtatgcgggccatcacggtatcagcggttccgcggggttgttgccgtccaaagacagtcaggaaggtcagcagttgcgcggcaagctgtcggggctgggcgtgttgcgtaccaccacccggcaggaccacttccggggctgtgtcgtggtgccgataattggctgggccgaatcggccagtgtggccagccgcgggcgggtgctgcaactgtatggccgccgaacccagccggattacaaagtgctgaaagacagcccaaagcatctgtacctgtcctcaccactggccggggtctggaatgaggcagcgatgaaagccgctgcggaaattatcctgtgcgaagcgctgatcgatgctatgaccttctggtgtgccgggttccgcaacgtgatcgccgcgttcggggtgaacgggtttaaccgtgagcatctcgaagccttgcagtatcacggcgtgaagcgggtgctgattgcctttgaccgggacgaggccggagaccgtggcgcggctaatgtggcggctgacttactggaagccggtatcgaggcatggcgggtgcagttcccgccgggcatggatgccaatgactatgcgctgaaaagcggcaatgccgaacatgcgctggggctggccttgcaacaggcggtctggctgggacagggaacagcgccgggcgcggtgttcagccatgagcggcccgtcttgccgacggtgacggaaaagccccaaagtgccggggtggctaaatcttcttctttagccgccccgccggcgctgaccgttgcccccgtgccctgtgagcgcacggcgtccggtgagttgttgatgaaaagcggcccccgggtctggcggatacgggggatgaaaaaatccccggtaccggacgtgatgaaagtcaatgtgcaggtgcgggatgaaacgtccggcctgttccatgtggatacgctggacatgtatcacgcgcggcatcgtcagcactacatcagcacggcggcgcaagagctggaatgcgagctgtcggtcatcaaacgcgaagccgggcgggtcttgctgatgctggagcagcaacaggacgcgcaacagcaagccgacgccgaagcctcagggacaacggcggtgacggtcagcgcggaagacgaagccgccgcgctggcgttgctaacatcgccgaacctgacagaacagattatcaacgacatggccgcctgtggggtggtcggcgaatccaccaatctgctgaccgggtatctggcggcagtctcgcgcaaactcgataaaccgctggccgtgttaatccagagcagcagcgcggcaggcaagagcagcctgatggatgccgtgctgaacctgatgccggaagaggagcgtatccagtactcggcgatgaccggacagagcctgtattacctcggcgaaaccagcctgcaacacaaaatactggcgatagccgaagaagaaggggtgcggcaggcggcctatgccctgaaactgttgcagtccgacggcgagctgaaaatcgccagcaccggcaagaacgagcagagcggcgaactggtgacgcgggaatacagggtacagggaccggtgatgctgatgttaacgacgacggccattgatgtggatgaagagctgctgaaccgctgtctggtgctgacggtcaacgaatcgcgtgagcagacgcaggctatccacgccatgcagcggcaccgccagacgctggccgggttgctggctgactcggagaaaggctatctgacgcagttacaccagaacgcccagcgcctgttaaggccgctgaaagtggtcaatccttacgcccatcaactgacgttcctgtcagacaaaacccggatgcggcgcgaccacatgaaatacctgacgctgatacaggccattgccctgctgcaccagtatcaacgtgaagtgaagaaaaccacccaccgcgggcaggtcatcgaatatatcgaagtcacccaggacgacattgccctggctaaccggctggcgcatgaggtgctggggcgcacgctggatgaaatgccgccgcagacgcgcaagctgttactgctgatacaagagatggtgaacgcacaggcgcaaatccagcactgccagccaaatgaagtccgctttacccggcgggatatccgcgcctttacccactggagcgacagccagctcaaaaaccactgtcaacggctgacggaaatggaatacctgctgttgcatggcggcagccgggggcacctgctgcattatgaactgctgtgggacggagaagacaacggcgcagcccacctgtgcggcctgctggatgtcggagaagcggactcagaaaccgccggcagtgaacgcaagtctgacccggaaggtcgtaagtcttccccaagtccggggcaagtctggcctgagtctggggaagaaaaacccgcgtcagcccagacagaacaagggccggcaggggcacaagtccgggcagatgaaaacgcagttattaaggaaaataatcacagaggcgcattgcccgtacccgacagggataaaacgccggcagccgtcccgacaggtcatgagagcaagtctgacttaaatgaacgccagtctgcctcaagtctgggccaggtccgggctaagtctggggtaaaaaaatccccatcagggcaggcagaacacgggttcagcgtaccgcaagtcggggtaacggaagacaccgtgataaaaggaaaaaagaaaacacgccccttgtctgcgcccgcccctcaatctcaaccggaggtcaatcatggcaaaccgtaaaccccgcaagggaagtctcctgaccgtcgatgacgtctaccgtcagcctgtcggtccggcacatgacccaaaaagcctgtatgcgctgctgctgcgcttcgtggcctggcggcaggaacggaactggtcggaaaccacgctgaaagtgcagacccatcacacctatcactttatcctgtgggccacggaccggggcctgtactatgccgcggacatcacgcggccaatactggagcgttaccagcgctacctgtaccagtaccgcaagaccaacggagagccgctgagcatccgcacccaacgcacgcagttgcagccgttacaggtatggttcaaatggctgacgaaacagaacctgatactggcgaacccggcagcggacattgagttgccgcgggaagaaaaacgcctgccgcggtatatcctgagcattgatgaaatcgagcatatcctgtcgctgcctgacccgaatacgttgcagggcgcgcgcgaccgggccctgatggagctgctctggtcaaccgggatacgacgcagtgaagcggcccggctcgatatctacagcatagacgggtcacgcaaaacggtgaccatccggcagggcaaggggaataaagaccgggtattgcccctcggcgaacgggccttaaactggctccagttctatcagcaacagattcgcccgcaactgctggtcaccccggacatccaatcactgttcgtggcaatggacggtctcgacgggttgcagccgaacggtatcacgaatgccgtaagcggttatatccgggccgccggcattgagaaaaaaggtgcctgccacctgttccggcatgcgatggcaacgcagatgctggagaacggcgcggacctgcgctggatacaggccatgttaggccatgccagcgtggagtcaacccaggtgtatacgcaggtctctatccgggccttgcaggcggtgcacgccagcacccatccggcggagcaaatggccgacgaaaaagtccgcgacgccgatgaggtgggtttactggccgacctgtacgccgacgataacgccgacacggacacgccgccggacagttcagagccgacctcaaccgccgatagccgctgagcgtccgcacgcccccgttgagttgggcgggttcggtgtgggggcagaccgtggccggactgcccgtcggcatcggcgcacgcgggggtaaatagtcgtcaggcggctcaaccacgagcgtccccgttaagccggtccaggccgcccaacgcctattgaacataatgcgggggaattatacgcactgcgccggtgagcccgggcaaccgcctgagcattgatgagcggcttaatgcgtataattggcattatgtcttgcgcccccgcgggtcagcattggcgggtgtggcgcacaaggctgcgccttatgctctaaccgactgagccggacatcggcaactctgagttcttctttagctgccgtgccaacgtccggccaacaaccctgaaggcagatcggcctgcggcctccgctcattgacttccccccgccccaaccccgctgcactggctgcgcccggttcgcagtcgcaggctccttgctcattcccgtgctcgccatcgccgccccgtgcagcccccgggggcttccctgaacaaaacaaaaccgcgtggtcatgcaaggtcatacgcaaaccgaagccacagtgcctcagagcgtcgcaggggcgccgcttgcgggctctgtgccgcccgcgcccgcagaacgggcacccgccgcccaagcgagttgggcgacgttcgcccgttgccgaaaaaggcgctacactgaccagagcgcggcgggaaaaaccggccttcgggggcgaaaagcgcgtcagggggttttggggccggcggtgaacgcccattggaaaaaacgggtggtaactggctgagggcattgggaaaatcggtgtttggcggtcaacgtcgcaatggaatgggttgttgcggataataatgccctgagcttacccaaaggcatggcggattatggtcggtcagcatcaagtctggctaccgctatgttaaatgaaggtaaatcccctcaagagatttcagcggcattgtcaaaacatgccaaaggcgatcacccggaaggacaagatccggcaagaggattattagtcgcttggggggcaggtgcttctgctgtgggaggtactataattgcgcctgttgctgggaccgcagccgtagtgggtggagctttacttggtgcaatatccgataccggaaaacagcttatcactatgaaaccaaacgagagttacagctataccgacacccttatagctgccggagtgggagcattaacccaaggtaaaggtttgatatatacagaaggggtaaatattggtggagcctggctgggtagcaagcttaaaggtgaagatgcaactggagctgttataggtgcggctgttggtactgtagcaggtgctaaaggtggaaaaataattacagataaactggctcctgtcgttatcagtcctgtagcgtcagaaataggtggtgctatcggaggtactgttgtaggtacagtaataggcactggtattgaaaaccagataaaagaaaatggagctaaaaatggaaaataaacgaataggattaaaagcttttatcctacttacagcttactggacatcgtttatttttcttttggcctttattgcagggttagctgtacctgcattttattattttgaaaatggttattttaattatcattggaatgattttatttacactgcgagagtaggagttggtgcaggattgcctgttggaattggaatttgggtattggcgaagatagaagaaattcgcaaaagaaaatcctcttcagatccttagctacttaattccggccaatataatcgcaagtctggatacagcttgttgcggataataatgccctagctataccaatgccaccaccaccgatagccggttcaaacacgggtgaagccgtgaatgaagcaaaccagacaatagcttcagctttggacaaaaaattgaaggaaatgggagagtctatagataaagccacccaatgttcttttggccgggtatgttcgtcagattatgtcgataatgaaagccaaccaaatgtagggaagaatctgacaaatgaagaaaagtctcagtatggtggagttggttctggatcacctagtggttgggaaccacaggatgaggagaatgcgagaactcagcaatctgattccaaaaattttgatgataagtttaaaaagagtgatttagtatcttctgctaataagcctattaataatcaaggattatctgctggggctcgtgcttgggaaaaacacgcaggaagaccaggaggaatatttgagccgttaaaaggaaatgttactcagaaaaatgaagcagctagccggttcgtaaatgaagtgttgaataataagaatactgtccgaaccgatttatccaagggtggtatagaataccgtctacctgatggtagaggtgtccgctacaactcagatggttctttctcaggttttttagatcctaaaaggtaaaaaaatggctaataattttgaagtggatttttttagtgactccagatacgaagagctgacagcagaaatttcgtatagggggcaaatactttgtcaacttaacaaagacaagggaattgattctattgagattgaatttttttcagatagtaggattttggaaaaaccaatagaaatgaaattcccgttagacgagtttataaatgtgttgatgaatacaaaagtagatctcattacatgattaaaatctcggtttttaagttgggattttacttttaattatcggtttagagggggcctcatctagatgattggttcctccatccgcgatgaccgagaccaactaatcggtggtaaaagtcgcgtcggggcattatgagccggacatcgaactaccccgggaaaaatcgtttgtaaccgattgagtacattggagtaattggtgtccggcggtcaacttcgcaatggaatgggttgttattgagaataactatctgagcgtgaatgagctggacagttttgcgcatcaagcccgcacctgtgaaggcgaaagctgcaaacaagtgatcaaggatatggtagacactaatatccgcaatcagcaggaaatgatggatttctgcaacagcaacccgacccagtgtgcacagaagtatggttatctggttgatcagtggccggtgtttgaacgtaccctcaaaaatatggaccgggatggcacattgccggttgagttcagaaattacctgtcggcggtgaatacgttaggtcaggcggccacaggcaaggtaggcgaactcggctggacaaaacgctttgaggcgatgggcatgagcaaggaaacggccgctgcgatggcgatgacattgccaattgtgatggagggggctaaagggccgaagtcatcgccaacaacaaagggaagcacaggcgcggctgttaatacagagaaaacggcgctggaaaagattgggaaaaacagtcaaggcacaacgaatctgggtgataaatcggataatactgtttatcatcaacagcttatcaaaaatgctgaaaagatatctactgcgaaaccaggacaacaagttgctgcgccaagggatctgaatgagcaaactttctggaaacaggttgaatcaaatccgtcacaaggaagtaaattgttaggtatgaataaagatccccgttttcctacagcggctggttttcagaaaatggaagcaaaacataggctccctaatggacaaacaataactatccattaccagtacaactcaaatactggtaaagcctatgacatgaaaattactactcctcagagaatccaacaggatcctaaaaaggtaatagattcaataaaggataatgttaaatgaaaatacaagaatcagatggctctattgttgatgtttttgccatatattggtttggtgatgaaacatatttttatgggttaccaccaaattatggaggtttacaggcatataagtctcatgaagtctcagttatcgatacaacgatagattttaaaactgtttttttctcaaatgatgatgctaaaagtgttcatcattgggcattaatagaagaacagttgctggatgatctacttgagttagatgaaactgcttatcaacgctttttggcaatcctaaaggcagaaggtaatatagaacaggatttttgttaattaggcgtcccggtcagtggccgggagcttcctgcttttaaccgtcaactgttctcaacgagccggataatcaactgtccgtgctcaacactgacctgcactggctgcccggtcacaaagcccgcttcttccagccaattacctttaagatgcaagctgggatgctggctgtaatagcgggtcatgccagtgtggcggtcggcgtgacatcggctgatatagccgaccttatagcggcgttgcgctttcgaactgcctgaatttacattacaatcgcgttcagccatagctaactacctctgatagtgggttgtggttagcggtgctgggatgttctcagcatctcaacaccgcgtaagtattgtctcttcttgagcggctaacgttttaccgtccaacgtttagcatcatgcatatgcaacatactgctaatcactgtctcaatcgcttcccgctctttctcatccaactgtgagactgcttcgaactggagttttagccggtcatcgggtccgcgctcattgggatcaaaaagaagcatatcggcactgacattcaacgctaatgcaatccgccgaaacacatcaatcgtcggctgggatgtcccggcttcatagcgcttgtattgtgaaacgtgcataccaatcttgtcagccatctgttgttgcgtgaaaccaagctctttacgggaagccgccaatttatcagaaaagctcataggaaattccaaagttgctgtaactgacgtcactatacccctcccgtttttatcgcttgactaaaagtatcatatcagggactatatatattatcaatatgaatcttgacgcattttacaggagtagaggcaatgacccgcgttcccgataccgatttagcccgcttaaagcaaaccgtctcgttactggggctggcgcgtaagcaaggccgtccgatgaaaaaacgcggtgaggattatgtgctgcgctgtccgttccataacgagaaaacgccctcaatggtgatatcgcctgctaagaacctgtatcactgctttggctgtggcgcagcggggtcggtgctggactgggtgatacaaacggaaggggtgacgctgaaaatcgctatccgccggctgcgggagctggccgggttgccggatatggacaatgcagttgtggccgcttcttctttagccgccccgccggagtcacaggcggcacccctgccgcgcccgaaactggccgacctggacgatgacgggcaggcgctgttgcatcaggtgattgatttttatcatcagcacttactggcgtcaccggaagccaaagcctggctggcacgacgcgggctgaatcatcctgaactggtcagccacttccggctcggttatgcgggtcatcacggtatcagcggttccgcgggattgttgccgtccaaagacagtcaggaaggccagcagttgcgcggcaagctgtcggggctgggcgtgttgcgtaccaccacccggcaggaccacttccggggctgtgtcgtggtgccgataatcggctgggccgaatcggccagtgtggccagccgcgggcgggtgctgcaactgtatggccgccgaacccagccggattacaaagtgctgaaagacagcccaaagcatctgtacctgtcctcacccctggccggggtctggaatgaggcagcgatgaaagccgctgcggaaattatcctgtgcgaagcgctgatcgatgccatgaccttctggtgtgccgggttccgtaacgtgattgccgcgttcggggtgaacgggtttaaccgtgagcacctcgaagccttgcagtatcacggcgtgaaacgggtgctgattgcctttgaccgggacgaggccggagaccgtggcgcggctaatgtggcggctgacttactggaagccggtatcgaggcatggcgggtgcagttcccgccgggcatggatgccaatgactatgccgtcaaaagcggcaacgccgaacatgcactggggctggcgttgcaacaggcggtctggctgggacagggaacggcaccgggcgcggtgttcagccatgagcggcccgtctcgccgggtgtgacggaaaagcctcacaatgctgatgtggctaaaccggctgctttagccgccccgccggcgctgaccgttgcccccgtgccctgtgagcgtacggcgtccggtgagttgttgatgaaaagcggcccccgggtctggcggatacgagggatgaaaaaatcgccggtgcccgatgtgatgaaagtcaatgtgcaggtccgtgatgaaacgtccggcctgttccatgtggatacgctggacatgtatcacgcgcggcatcgtcagaactacatcagcacggcggcgcaagagctggaatgcgagctgtcggtcatcaaacgcgaagccgggcgggtattgctgatgctggagcagcaacaggacgcgcaacagcaagccgacgccgaagcctcagggacaacggcggtcacggtcagcgcggaagacgaagccgccgcgctggcattgctgacatcaccgaacttaacagaacagattatcaacgacatggccgcctgcggggtggtcggcgaatcgaccaatctgctgaccgggtatctggcggcagtctcgcgcaaactcgataaaccgctggccgtgttaatccagagcagcagcgcggcaggcaagagcagcctgatggatgccgtgctgaacctgatgccggaagaggagcgtatccagtactcggcaatgaccggacagagcctgtattacctcggcgaaaccagcctgcaacacaaaatactggcgatagccgaagaggaaggcgtgcggcaggcggcttatgccctgaaactgttgcagtccgacggcgagctgaaaatcgccagcaccggcaagaacgagcagagcggcgaactggtgacgcgggaatacaaggtacagggaccggtgatgctgatgttaacgacgacggccattgatgtggatgaagagctgctgaaccgctgtctggtgctgacggtcaacgaatcgcgcgagcagacgcaggctatccacgccatgcagcgacaccgccagacgctggccgggttgctggctgactcggagaaaggctatctgacgcagttacaccagaacgcccagcgcctgttaaggccgctgaaagtggtcaatccttacgcccaccaactgacgttcctgtcagacaaaacccggatgcggcgcgaccacatgaaatacctgacgctgatacaggccattgccctgctgcaccagtatcaacgtgaagtgaagaaaacgacccaccgcgggcaggtcatcgaatatatcgaagtcacccaagacgatattgccctcgccaaccggctggcgcatgaggtgctggggcgcacgctggatgaaatgccgccgcaaacacgcaaactgttactgctgatacaagagatggtgaacgaacaggcgcaaatccagcactgccagccaaatgaagtgcgctttacccggcgggatatccgcgcctttacccactggagcgacagccagctcaaaaaccactgtcaacggctgacggaaatggaatacctgctgttgcatggcggcagccgggggcacctgctgcattatgaactgctgtgggacggagaagacaacggcgcagcccacctgtgcggcctgctggatgtcggagaagcggactcagaaaccgccggcagtgaacgcaagtctgacccggaaggtcgtaagtcttccccaagtccggggcaagtctggcctgagtctggggaagaaaaacccgcgtcagcccggacagaacaagggccggcaggggcacaagtccgggcagatgaaaacgcagttattaaggaaaataatcacagaggcgcattgcccgtacccgacagggataaaacgccggcagccgtcccgacaggtcatgagagcaagtctgacttaaatgaacacccgtctgcctcaagtctgggccaggtccgggctaagtctggggtgaaaaaatccccatccgggcaggcagagcacgggttcagcgtaccgcaagtcggggtaacggaagacaccgtgataaaaggaaaaaagaaaacgcgccccttgtctgcgcccgcccctcaatctcaaccggaggtcaatcatggcaaaccgtaaaccccgcaaggggagccttctgaccgttaatgacgtctaccgtcagcctgtggggccggcgcatgacccgaagagcctgtatgcgttgttgctgcgctttgtagtgtggcgacaggaacggaactggtcagaaagtacgctgaaagtacagacgcaccatacttaccactttatcctgtgggcaaccgagcgcggcttatactacgcagcggatatcacccggccgatactggagcgttaccagcgttatctgtatcagtaccgcaagaccaacggtgaaccgttaagcacccggacgcaacgtacccaactggagccattgaaagtctggttcaaatggctgaccaaacagaatctgatactggcgaacccggcggcggacattgaactccccagactggaaaagcacctgccgcgctatatcctgaccatcgatgaaaccgaacagatactggcgcagcctgacctgacgacgttgcaggggatacgtgaccgggcgttgatggagttgctctggtcaaccgggatgcgtcggggcgaattaacccggctggatgtgtacagcgttgacggaaaacgcaaaacggtgaccatccggcagggcaaggggaataaagaccgggtgttgcccctcggtgaacgggccttaagctggctacagcgctatcagcaacaggtgcggccacaacttatcgtcaatccagacgtcaaggcattattcgtcgcaatggatgggctggacggcttacaggctaacggtatcagcaatctggtgacagcttatatcaacgcggtgggtatcgagaaaaaaggtgcctgccacctgttccggcatgcgatggcaacgcagatgctggagaacggcgcggacctgcgctggatacaggccatgttaggccatgccagcgtggaatccacccaggtgtatacgcaggtctctatccgggccttgcaggcggtgcacgccagtacgcatccggcggagcaaatggccgacgaaaaagtccgcgacgccgatgaagtgggtttactggccgacctgtacgccgacgataacgccgatgccgacacgccgccggacagcccagagctgacctgaacctccgatagccgctgagcgtccgcccgtccccgttacgttgggcgggttcggtgtgggggcagaccgtggccggactgcccgtcagcctcggcgcacgcgggggtaaatagtcgtcaggcggctcaaccacgagcgtccccgttaagccggtccaggccgcccaacgcctattgaacataatgcgggggaattatacgcactgcgccggtgagcccgggcaaccgcctgagcattgatgagcggcttaatgcgtataattggcattatgtcttgcgcccccgcgggtcggcattgcggggagtggcgcacaaggctgcgccttatgctctaaccgactgagccggacatcggcaactctgagttcttctttagctgccctgcaaccgttgggccaacccccctaaaggcaggtcggcctgcggcctccgctcattgacttccccccgccccaaccccgctgcactggctgcgcccggttcgcagtcgcaggctccttgctcattcccgtgctcgccatcgccgccccgtgcagcccccgggggcttccctgaacaaaatcgcgtggtcatgcaaggtcatgcgcaacccgaaaccccggtgcccccgagcgtcgcaggggcgccgcttgcgggctctatgccgcccgcgcccgcagaacgggcatccgccgcccaagcgagttgggcgacgttcgcccgttgccgaaaaaggcgctacactgacaatggcacggcgggaaaaaccggcctttggaggcgaaaagcgcgtcagggggttttggggccggcggtgaacgcccattggaaaaaacgggtggtaactggctgagggcattgggaaaatcggtgtttggcggtcaacttcgcaatggaatgggttgttgcggataataatgccctaggtgcagcagccgggtcagacttgggattttggttggctaaaacaccggactgtgatacggcttgcaaaagtaatattgctaaaggtatagctaatggaaatctaattgtctctgtgggaggaatggcagtagccggtggtgcccagattgtggccgccacacctgaaattgcagcaatggcacgagctgcactggaaggatgtaaagctgcgccaacaatttgtctaaataatgcaggtattcaggtcgcagaagcattaacgccgggtggtgtgggcgcagccggcgtaataggtgtgggtaaaactgcggcagaggcagtggcagcaaaatccgaagctgtagcggctaatgtggtgaagaatgtctcgaagaacttagaacaaggagtatcaaaaactataaaatcttatggcccgcatgaaattggcccattaggaaaccccaatgatttgcgagctcctgcttcaacgttcagaagtggaagttatactgaaaaagtcgcagaaacagatatatattttttcagagattatggcggctctgctaaagttgatggtcgcttttggactcctcagccatcaaaaggacctctacaatctcaactggatagtgctgttttacctgaatggggtaatacttttaaaaaccaagccattataaagatccccaaaggtactaagtattatgaagggccagcggcagcacaaattggaactaaagggactcaaccaacgttacatggtggtggtacgcaaatatttttaccatcactagacaataactggataattaagaaatgaacacaaaagaaatagttgaaaattgggtaaaagagaaaaaatcactttacttctttctccctgatggcccttatggtagaccctttgataatcaatatattattgagaaaattgaggaaaccagtgagagctttaacataatattttctaatgaaatagcattgcgttttctgggaaaaattaatatcacagatgagggatataatctaacaataagcgattttactaagtgtatatttgaaataagcagtaggattcttaaaagttatacagaagggcaagtagtattaagtggcttttaaacaacgatccagcctttacaaagctaagagggcagcatgagtccaccggggtaatatttaatcagctccacgctagcaggcggtattgccggtgactccaccgccagcgccctcaccggggcgcaggccgggaagaattcggtggataataatgcccttagcatgggaagtttgtttggttccgaaagcgctaaacattttgaaggcgcagggtcactggctcaaaagatgactcaatccggggcaacacccgaagaaatcaacgcagccttaactcactacctcaaaggacaagtccctgagggtcaagacccggcaaaaggtctgattattgcgtgggggaacttctttggtgttccgttagatgtcgtgttatcaaatgagcagatgacgccacagaaagcggcggaaattgttgctggagggatacctaccagtgaagcgaagctgatacagtttgcagccgcgaaagcatatctgtctttaagtaagtatcggtcaacagaagtggttgaggggaaaggaggttctctggctgataaaagtattactggaaataagacgacgatttcatctataaatgagggcaaaggtacttctggacgactccctgaaaagcccattaaagaagtaacagcaacagaagtaaataattggtggaaaagtcagggatatgaacaacctccatatactccaggaactacagtaaaggaatttgaattagcagctaacacgcaatttgttagggtttatgatggtactcattcacaaatgagagggggatggatgatgaaagccgaagatataaaaggattaagtagtaaacaaattcaagaaaaatttgctttgccatatgagccaaaatacgttgcggatgttgaaattaaagcaggtactaagatgagagtaggttctgcaaatagtctgtttggctataaaggtggaggaacccagtttgatcttatggggcaaagaacaggtacattcactaatgaacaggctattcagaaaaaataggatataaaatggctatcttagtaaacgataacaagattaatattaatgggcacttaattatatttaatcaaaagattattaaggcgatagaaatcgataatggttctgttcttgtcttaactgatattcctataggagatgacggactaaataatctattttcttacacaaataatggagaatttctttggcaaatagagccttcagatttacaaaaagaaggtcaaatcagttacccatatgaaggattgaacgttgttgaagggcaatattttgttgttgatttttatggaagaagaatatttttcgatcctcatactggcctattcttatcacgagatgttgtaaaataaggttgagaataatgcgctggcctcccgaaatctgggcgattgccgcacgctgtcaccggaagccgtgcggtaaggccaaagaattaagccagcgcattctggataaaggtctgccgtcggttgaagacatgcgcggtaaactggcatcgtgtcaggatgacagttgccgtaaaggggtctggacagcgtaccggcaggccagtgatgccaccatcaataccttgaaacaaatggcgttgaatggtgagttgagccgcgaagagctggcctttatcaaccatgaggtgggtaaagaactggcggtatcgggataccgtgccaatgacaagctaggccgttcagagcagagcagctggttaaatggcggtagtggaccactttctgggttctttaacacggaactgcgccaaaaagagctggaaaacgccgggttatctaaagccgatgcggcgcagtatgtgaaggaagagcaacggaatctggtgttgctggagaccgcggtcggggctattggggcaaaagctaatagaacttctgtgaatatagtcggaaagggaactactcagacaggaaaagggacaacattacctgcgggctataccccaaaaggaaattcagttaccaggccaaaaaatggtgtttataataacactggaaaaatagacgcatcaggaaacacaatttatagtcacaatggtgggtactatacgtttgaaaatggcgtgaagacaagagttcaatcggtcgcggtaggaatagtcgttaccggctatccccccccccgcacagatccggacgtgcgctactaacgcatccggctcctacctcgggtgtttggcgtaaaagcgctgcaaaggataaggatgcacaattcgggggggcggtatccatttattcacccgctgactgtaacggtcgcggtaggaatagccgttaccggcaattcctaccgcgaccggcactcgggcgaaagaactggctttttgcgggttccctgccggcggggcaacgggcagccatgataatgaggctgctggaaaccgccagagccaacggacatgagccctgggtctggttacgtgatgttctcagccgactgcctgtctggccgaacagtcggttgaatgagctattgccctggcctgagaatcccttcagttaacatcccattttgttgttatctgacaacgcagtcagctcggttttttattggaaatcgtcgctggcttaattgcttatacattccaacctaaaaaaccgagcttgaatttacgggattgtgatatcgctatttttaaacgaagctgaggttaataacgttctattcatagcttcagctagcgtgattttattctcattctcccccatcatacttgaatgattacccggaatagcaatcaactgtagtagtgtatcaggcattattcgctcccaacctaacgattgctctatgttcacaaattcggccccctcatttgtcacaaaaaaggcatcaggagaaaattctattgcatagaactgatgcaaagttactgccaacgttggtggttcataattaacccgaattctggataagaaattgacgagaagcctgttccaggagcaaagttttggtgtgcaccaaaaacagctccgaggggggaacaggctatggacaacttagttgaaattttctgtgatgtcgatgatttttgccgttttttcatccctcaatgggaacaattttgtctcgatagcgggcatcgtttacgccgccgacaaggtcatatgtatcccagtgaaatcatgaccattttgatcctttttcatatgtcgcattaccgtgattttaaacatttttatctagaacatatttggaaatatcaccataaggattttccaaccttgcttagctatcctcgttttgtcagtgtggctccttccgttttggtgccattatgcagctatctgactcaattaaaagggaaacccacaggcattgcttttattgattccacccgtttgagtgtctgccataacattcgcatccctcgacataaggtctttgcggggatagcaaagcgcggaaaaaattcaatgggctggttttacggtttcaaattacacctggttgtcaatcatcagggtgaaattctcgcgcttaaagtgactccgggtaatgtggatgatcgggaacctgttcgtgaattatcaaaagaattaacgggttctctttacggtgacaaaggttacctcagccaggaattggcggacgatttagctaaaaccgatgtcactttcatcacgaaaaaacggcgtaacatgaaagcgagtatgcaagctgagtgggataagataatgttaaaaaagcgttttatcattgaaacgattaatgggcaattaaaaactctttctcaaatagagcattcccgccaccgaagtataaaaggctttctgttgtgcgttttaggtggattgattgcttactgccttaaattgaagaagccatcactgaaagttttctactcagaagacgatttttcaatgacggattaagcagaattcgggttaattagcaattaattgtgcataacgtgcaatttgctcccaatattttgcgaccacatcggcacgtagagttgccggatataattccagttcttgtgcggcctcaatcaactgaactaaattcaacgcttcaatgttctggtgcaacaccgatatctcttctagatgctctccttctaaccgttgagtgagtccaacaaggaaacgatatttcggttgcagaggatcttctcttaaataatgaggcgctagtgtatcaatcatccccaagaaattaacctgctcaccggcattcaaaagttgctgagcaatcgcataagctaatatacctccggaagaatagcctcctatcctgtatggccctgtggattgaacagctttcatcagggtaaccattttggcagctaactcttccatcgttgacatcggttcttcattgatggaaggccaaggtaatgcataaatcgggtaacccgatgagatatactgggacagcccgaaggcatacgaatagtctcccgtaccagtgggaattaaaaatagcggtaaccctgttccaccaggccgtactgatatggcgctattttgtctttgaagcagagggtctaaggttatttttaccgccagttcgaccaacacagggaactgaaacagggtatttaacgtgaaattcaagccctgcccagcagcaagattcatcattcttacagctaatagtgaatgtcctcccagggcaaagaaattgtcgtgccggctaatttgttcaatgcccagcagtttatgccaaatcgtcgccaacaagatttcggttgctccttgtggtgcctcatagtgttgacgggcaaacgcatcgctatccggtgctggcaatgcctgtttgtccagttttccgttagcggttaacgggaagctctctagtcgcacaaatgccgccggtaccatataatccggcagaaccgaattcaggtggatacgtaagctgttaaccagtccctcctcagcgtccgccatcacataagccaccaaccgtttatccgacccgtcatccagtgccaacacgacggaaccacgcactgctggatgttccatcaactgggcctcaatctcctccggttcaatacggaaaccgcgaattttcacctgctgatcattacgaccgaggaactccagattgccgtccggacgataacgcgccaaatctccagtacggtacatacgtgcatccggtttatcactatataggtcatgaaggaaatgttcagccgttaattcgggacgattgagataaccatgagccacgccagcaccggcgatataaatttcgccgactacaccaagcgggacaggttgcccaataggatcgagaagatagatctgggtattggcgatgggacggcctatcaccgatacttccggtatttctgtctgagtagggtattcataccaggtggcatcaccattaatttcggatgaaccatagaaatttaacagacggagccaagggtaatccgtcacaacttgccgagccagttcaggagccagccgttctccgctgcaaactaacgtcctaatggatttcaatttatcgctataaccttgaattaagtgttttaacagcgaaggcaccaccaccagataattgacgccaaaacgacgtaaaccatcactgaaacgatcgaaatctttcacttcatgatcattgaatacaaccagtttacctccagccaacaacacgcctagcatttcagtgacagaatcaacaaagctgatgctggtttttagtgccccgaccaatggtgtcgttgcgatattccggacgaaccatagtaggcggttacataaagcctggtgactattcataactcctttaggctgtcccgtagagcctgaggtgtaaattacataggccagatggtgtgatgtcagtcccaacacctgaggatctggattatcggtggaatatgacatccaaagttgagtttgggcatcaagtacgacagtaggcacagtgctggctagccggtcaacccactcggtttgagtcagtactgcaacgggagctgcgtcttcgaacatataggccaatctttcatctggataagcagggtcgagcggcatatacgccccaccggctttcaggatggccaatatcccgaccaccatgaccagtgagcgtgagacacaaatcgccactaactggtcgggcacgacccccagcgtaattaattgatgtgccagccggttcgcccgggcgttgagttccgcgtaactgagcgactgattttcatacaccagggcaatggcgtccggggttgtcgctgcctgccgttcaaataactgatggatacataagtcttcaggatacggcgtttccgtggcattccaggtggtgagtaacaaggtccgttccgcggccggcaggatatccagggcacgcaccggcctgtccggggtgtgcgccagcgcttccgccagactgtccagtgcctgctgcatatagtcacagacccgctccggcccaaacggctcgacaacctgagcggtcagccccagcgccgtcccaaaatcctccaccgacagcgcaaacgggtagttagtccgctcctgtccgcccataaattcaatgccgcttagtccctcatcggacagggctgatacatcattgtgtcggtagttcagcaaggcactgaaaagaggccccgcattgtcaatgctgctgcaccgctgagccagcgccagtgacgcatgctcatgcgccagtaatccggccagccgggactgggcctgccgcacactctcccgcaccggtgtgttatcgatatccagtcgcagcggcagggtattaataaacagtcccatccctgtgccggcccctgctcccgccgccatgcgcccgaacagcaccgtgccgaacaccaccttttcctgcccgctggtgcgtgacaacacctgcgcccaggccagatggcacaacgttgccagactgacgcccaactgctgcgcctgccggcgcagacgatcattcagttccgccggcaacatccggtggaattccgtcacctgtgagccgtcacggtggacctccgccacgccgaacggcagggtcggctctgttacctccgacagcatgtcggtgaagaaacgggtgtgttcttcctgactccggcctaaccgggcccgggccaccagattgcggaacggcaccggggccggcagcgtttccgcctgctccgtcagaaacgcccggatttcacgatgcaggacttctaacgtggtatggtcaccaatcaggtgatgctgtaattccagtaagcaccaacgcccctccgtgtcccgggcaacaacaaactgcaataacggggcttcacttaagttcagacgataatggcgcgggtcaaaacgccggcttaactgctcactgaccggcccgtctgccggatctaatgtcaattcggtgacggataacggggcctggcgccagaccacctgcgccggctctgacagcccctgccagataaaggcggtgcgcagaatatcgtggcggttgaccacctgctgcaccgcggccagatagcggtccagcacctcccgagccgcaaataccatctgaccggtcaacaagtatggatcgccctcacttgccagcaaatggtggaataagatcccgtcctgcagcggggacagggcataaatgtcctgaaggttgctgaggccgcccggcacctgcccaacgatacggtcaatatccgccggcgtcagatttatcaacggcagcatagccggcgtgagcgtacaggtatccggggtaatcacattggcaggcacgggcacggccgcgtactgcgccagcttttgtgccagattggctaacaccggggtctgaaacaggtcgcgtaccgccagtgtcagcccctgctgacgcaaatgttctatcacccgcaccgccagcaaagaatgcccgcccagggcaaagaaattgtcatgccggctgattttttcaatacccagtaactctcgccagaccgccgccagggcagtttcggtggcgccctgcggggctgcataacgctggcgggcaaaggcgtcctccccgggcaccggcagcgcccggcggtccagtttgccgttcggggttagcgggaagcggtccagacgcaccaccgccgccggcaccatatactccggcaaaacttgactcaggcgctcacgtaagttatttaccagcccttcttccacgtccgccgccacatacgccaccagccgtttgtccagccctttcccgtgagccagcaccacggcttcacgcaccgccgggtgttcggccagccgcgcttcaatttcccccggttcaatgcggaaaccgcggattttcacctgctggtcagtgcggcccaaaaattccagattgccgtccggcaagtagcgcgccaaatccccggtgcggtacatccgggcatccggtttatcgctgaacgggtcggccaggaaacgttctgccgtcagttcaggccggttcagatagcccctggcgaccccatcaccaccaatatacatttcaccgacagcgcctaacggcaccggtaatcctttggcattcaatacataaacccgcgtattggcaatggggcggccaatcgggatgctggttatgccctgtgctaatgccgtaatacggtaggtggtcgtaaacgtggtaccttcactcgggccataagcctgtaataattgctgtggcggattgccagtcagcacctggtcaataacattagggtcaaggacatcccccccaacaatcagaatttttatctgtggtaaaaccggggataactcccccgccagccggttaaacaggccgacaaccagtgacagaactgtgatacagtggctctgtaatgcccggactaactgccatggagttaataatgtactgcggtcgataaccaccagcgccccgccgttgagcagcggagcccagacttcaaaggtgccggcatcaaaggcgggattcgcggtaaaggccacccggtcatccggttcaatttccgcatagccattattgataaccagccggatgaccgcacgatgcgacacaataacccctttcggtacccccgtcgaaccggaggtatacatcacataaacggcatctgaaccccgacgggttaagttaagatcccgttcgtcatcttcccggccgggatctgtttcctccctcattcgcaataacggcaccgccagattgttcgggatcgccatgtgattatccgtcagcagcaactgagccgcacaatcctgtatgacccagagtttgcgctcatccggggtatccggatcaatcggtacataaaccgcccccgctttaagcctgtctcttgatcagatctccaaatcaactgatttagccagcaaatagccgtctatcagggtttgcagccgaaaccagccttcccaaagtcgttcccatccgactcgacccgtgcgtttggaatcgtaccagccggccagttttcccagattgatgaaggcccaatgcaaactcggggcttttttcggcacacggcgtttttcttgttttgaccacagtaatttccacgccagggggcttaatactgtctcacagctctctttctctgcctcttctttgttcagacccataaaacgcagctggtgtattcgtaccgcaataaaggccagcagcactatcatgcgctccagattatctttgctttgcatacgcagcgcttctacctgcgtgccgcccgttttccacgctttgtgaaattcttctatcagccagcggcgctcgtaataactgaatattttatgggcgtcttcctgactgttgacgggttcggaggtcagaagatgccagcaaagcccatcctccggacctttttcgtagcaaccgacataaaatatccgcaccgcctcaccgctttttccttcggggattttcaacgtcacttcggcataactgatatcacaatgcgcgacacgcgcctgacgcccgcctttctgtctgacctgaactaatcgttctccagcactctgtaaccggctaataaagtcataaagtttatcctgactttcctctatacgccggttttgcatcgaacggatgacgaaacgttgtttttggctcgttttataacgcagatattcgatgatatcggcttcacggtcacagacagaaatcacgttggccatctgctcccctaaccggctgtcgacggcttgtgaggcccgttcccacttataactctctttcccttcataagggcgtgtatcgcgttgtcggcttttgccataatcactgacatctcgacaccagcgctgttgctctatcaaccccacgacctgttgttcttcaggcgcaaataacaacaccgagtgtgcctgcatgccccgggatttttcctttgaggtggtatagccgagttcatcggcgaccgacgcatgggaaaatgacagggttgtcgtgtcttccagcgctaacaggcaatgataacgttgagcgtgagcgacggtggcggtaaatccggcttcggcgatggcctgaggcgcaatggcggaatttcgggtcagtcggtaggccgcttcaacatcggcaggagagtcaagagattgcacgagcgattgtcctatatggttagccaacgaacaggccactttcaccaggcggttggtacggcgtttatcacctaattccgcatgttgaaacgtgtcatttgcccattgttcggcgctggttgaaaacataaagattacctcaagtcgtgttttttattgagatcaatctatgagggaaaagttcaataacgcgggggcgggttaaaatatttgtgtaggaaagacaggctttaagcaccgccagctgggcgaccaccagtgctattgagcgttcaaacaacagcgctatatgtccgccgggacgaactcccagtgcaatgagttgacgagccagtcggttcgcccgggcattgagttccgcatagctgagcgactgattttcatgcaccagggcaatagcgcccggggttgtcgctgcctgccgttcaaataactgatgaatacataagtcttcaggatacggcgtttccgtggcattccacgtttccagcaataaccggcgctctgccgatgtcaggatatcaatttccccgatccgctgttggtggttagcgaccatcacctgcaacacagtccgcaggtagccaatgtgtcgttccatagttgtctgatcaaacagggcggtggcataacgtaaattacctgaaatcgcgccattatcctcaaacatatccagttcgagatcaaatttgacagtatctaaaatttggtcaatcggtgacgccatcaggcccggcaatgcccagtccgtgtgttcattgttctgccaggcaaacatgacctggaacagcggcgtatgcgccagccggcgcggcggttggacaatttccaccacctgctcaaacggcagatcctgatgggcctgggccgctaacgcggtttgccggacttgggtcagcaattcggcgaccgttaatgcacccgagaagtgcatacgcaaggccagcgtattcacgaagaaccccatcaacgattccacttcctgccggctgcggccggcactcggggtgccgataataatatcctcctgaccggacagccgcgataagaccacgccccaggccgacaacacggtcataaacagggtaaccccgtgctgctggcttaactgtttcagggcggtggttaattcgggtcccaagtgaaccggtaatacctgaccggcaaacgacggctctggcgggcggggacggtctgtcggcaacgccagcagcaccggggcatcggccagtgttgtgcgccagtagtccgcctgcgcctgggtacgttcggcggaaaaccactgatgctgccaggcggcgtaatccgggtactgaatggccaatgggggcagcggatccggctgaccggccagaaaggcggcgtagagtgcgttcagttcatttatcagcacattgactgaccagccatcggacacaatatgatgctgggtcagcaaaaaacgataatcctcttccgtcagtcggataagttccgcccggataagcggtccccggctgaggtcaaacggtgcagacatttctccagcacacaggcgttctaattccgtatcagcatccggatgcccgcgcaaatcatgctgtaccagcggcaccccgtcgtctgccgccaacagatgaatctgaggctgaccgtcaaccgaaacaaaaaccgtgcgcaatgcttcatggcgggcaaagacggcattcagggcctgctgccaggcggtgatatccagccggccgcgtaaatgcagcgccagggggatatgatacgtttcactgaccccgtcgagctgggccaggaaccataaacgctgctgggccaaggataacggcaaagtttccgtccgggagaccggcagtatggcgggcaaggcgggccggtcttgtttctgtaccgcctgcgctaaggccgccagcgaaggcgaaggaaacagcgccgccagcgggagctccacacccagtacggtcattatccggttcatcacccgtaccgccagcaaagaatgcccacccagagcaaagaaattgtcatgccggctgattttttcgatacccagtaactctcgccagatcgccgccagggcagtttcggtggcgccctgcggggctgcataacgctggcgggcaaaggcgtcctccccgggcaccggcagcgcccggcggtccagtttaccgttcggggttagcgggaagcggtccagacgcaccaccgccgccggcaccatatactccggcaaaacttgactcaggcgctcacgtaagttattcaccagctcttcttccacgtccgccgccacatacgccaccagccgtttgtccagcccttccccctgtgccagcaccacggcttcacgcaccgccgggtgttcggccagccgcgcttcaatttcccccggttcaatgcggaaaccgcggattttcacctgctggtcagtgcggcccaaaaattccagattgccgtccggcaagtaacgggccaaatccccggtgcggtacatgcgggcatccggtttatcgctgaacgggtcagccaggaaacgttccgccgtcagctcaggccggttcagataaccccgtgcgacgccttgacccgcaatataaatctccccaagtccccccagcggaacaggctgaccgcacgtgtcaagaatatagatacggttattggcaatcgggcgaccgatgggaggcaaagtgggccaccggttcggatcctgatccagaatgtatgccgttgtcacatggctttcagtcgggccatagtgattgtgtaagcggcaaccttctgcacgttgcagaaaacgctgaatggccggtgttatacgcagttgttcgcccgcggtgacgatatgggccagacaggaaaaatcttccccgctgtggctggctgcttccgcaaggtgctggagtgcaatatagggaaggaaaattcggtcaatccgttgttgcgagatcaggcggagaagctgttccggctgccggcgcagggactcattaatcagcaccagacagccgccttcacacaaggtggtgaagatttcctgaaaagcgacatcaaatcccagtgcggcaaactggagagttttaccgtttccggcgggttgtgacggggattgacggtgccattgtagcaggtttaacagacccgcctgcggcatctccacccccttaggtaaaccggtggaaccggaggtgtagataatgtaggccggatggcgtgatgtcagccccaaagtttggggttccggattatggtcaggttgttcaacctgtgcagcgtcaggggcatccagcagtacgattgtgtagtcagccgcagagaatgcatgcttcgaactgtcagcgagcacgctctgggtcagcaaaaccaccggtgcggcatcgttgagcatatacgccaatcgttcaacaggataatttggatcgagcgagacataagcaccgccagcttttaataccgccaataatcccaccaccatggccggtgaacgtgagacacaaatcgctacccgctgatccggctctacgcccaacgcaataagttgatgggccaaccgattagcacgagtatttaattcggcataactcaggaactgattttcatacaccaaagccgtcgcttccggggttttcgccacctgttgttcaaataactgatgaatatacaaatcttcaggatacagcgtttccgtggcattccagatttttagcaacaaggtacgttccgcggccggcagaatatctaacgccccaaccggcctgtccggggtgtgcgccaacgcctctgccagactttccagcgcttgctgcatataaccgcatatccgtgccgggtcaaacggctcgacaacctgagccgtcagccccagcgcatcaccaaaatcctccaccgacagcgtaaacgggtagttcgtccgctcctgcccgcccataaactcaaccccgtttagctcctcatcagacagggctgataccgcattatgccggtagttcagcagggcactgaagagcgggcctgtgttgtcgataccactgcactgttgcgccagcaccagtgacgcatgctcatgcgccagtaatccggccagccgggactgggcctgctgcacactctcccgcaccggtgtgttatcgatatccagccgtagtggcagggtattaagaaacagccctagcccgttatccatccctgctcccgctgccatgcgcccgaacagcactgtgccgaacaccaccttttcctgcccgctggtgcgtgacaacacctgcgcccaggccagatggcacaacgttgccagactgacgcccaattgctgcgcctgctgacgcagacggtcattcagttccgccggcaacatccggtggaattccgtcacctgtgagccgtcacggtggacctccgccacgccgaacagcagggtcggctctgccacctccgacagcatgtcggtgaagaaacgggtgtgttcttcctgactcaggcctaaccgggcctgggccaccagattgcggaacggcaccggggccggcagcgtttccgccagccccgtcagaaacgcccggatttcacggtgcaggacttctaacgtggtatggtcaccaatcaggtgatgctgtaattccagtaagcaccaacgcccttccgtgtcccgggctacgacgaactgcaataatggggcttcatttaagttcagacgataatggcgcgggtcaaaacgccggcttaactgctcactgaccggcccgtctgccggatctaatgtcaattcggtgacggataacggggcctggtgccagaccacctgcgccggctctgacagcctctgccagataaaggcggtgcgcagaatatcatggcggttgatcacctgctggaccgccgacaggtagcggtccagcacagctcggtccgcaaacaccatctgaccggtcgacaggtacggatcgccctcacttgccagcaaatggtggaataagatcccgtcctgcagcggtgacagggcataaatgtcctgaaggttgctgaggccgcccggtacctgctcaacgatacggttaatatctgtctgcgtcagatctatcagcggcaacatggctggcgtgagcgtggtggtatccggagtaatcacattggcaggcaccgccacgctttcggtctgatgctgccccagtgtctgggctagatctgacagtactggtgtttgaaacaagtcgcgcaccagcaatgtcaaccccagctgacgcagacgttcaatcagccgtacggccagcagggaatgcccgcccagggcaaagaaattgtcatgccgactgacttgttcaaggcccagcaactcacgccagaccgccgctagggcggtttcagtggtgccctgcggggctgcataaagctgacgggcaaagtcgtccttcccgggtactggcagcgcccggcggtccagtttgccgttcggggttaacgggaagcgatccaggcgcaccaacgccgccggcaccatatagtccggcaattgggcactcaggcgcgcccgcaggcggttgaccagccccgctttcgcatcggccgccacatacgccaccagccgtttgtccgtccctttcccccgtgccagtaccacggcttcacgcaccgccgggtgttcggccagccgcgcttcgatttcccccggttcaatgcggaaaccgcggatttttacctgctggtcattgcggcccaaaaattccagattgccgtccggcaaataacgcgccaaatccccggtgcggtacattcgcgtatccggtttatcactgaacggatcgggcaagaaacgctctgccgtcagttcaggccggttcagataaccccgcgccacacccacaccaccaatgtatagctcccccaccgcccccagtggcaccggctggccgtcagcatccaacagataaacctggctgttggctgttggatatccgatagggactaacgcgtctgtatagcctgacgggcaacgccagatcgtggcacaaaccgtgctttctgtcgggccataagcattaaacaaaattaccctgtcacatagctcctgaagcaataccgcattgggcgcttcaccacacagtatcactgttggtcttattgttaacgacggtaaattggctccattctgaagcaaagccggaggcagagtgatatgtgttaccgcttgttgttccagataatgccagaggcgatgtgggtcataacgaactgtgtcggcagcgataaccagactggcaccacctcctaacgcaatcatgatttcccaaatgctggcgtcgaaccccaaggaggcaaactgcaacactcgactttcagggttgatactgaactgagtaattttctcttgaatcaggttaaccagcccgcgatgctcaaccatcacgccctttggtgtgcctgtcgaacctgatgtataaatcacataggccagatgccgtgaggtcagtgttggcaccgtcgggttgctgtccagttggtttactgatgtatttggatcgaggacaatcactccgtctaacgctttttcatccagtgctgcataccctgccttatcagccaggactactaacggcgctatatcatccaagatatgcgccaaacgcgctcccggataggacggatctagcggtacataagccccaccggctttcaacacggccaatatgctcactatcattgccggtgaacgggccacacaaattgcgacccgctggtctggtacgacacctaaaacgatcaattcatgagccaatcggttagcacgggcattcagttcggcatagctgagtgtttgctcttcatatatgagtgctgtggcatcagacgttctccccacctgttgttcaaacaactgatgaatacataactggtctggatagacggtttctgtcgcgttccaggtttttaacaacagcgtacgttccgcttccggcagaatttccaatgccctaaccggcctgtccggcgtgtgttccagcgcttccgccaagctttccaatgcctgctgcatgtaaccacatatttgctcagggttaaacggtcgtatcacttgcgccgtcagccccagggcatccccaaaatcctccaccgacagggcaaacgggtaattagtacgttcctgcccaccaaggaattcgacaccttccatcatgttatcggtagccgccagtggcgcattatgtcggtagttcaacagtgtattgaacaacggagtaccactggcaaccccactgcaacgttgagctagtgccagtgaggcatgctcatgcgccagtaatccggccagccgggactgggcctgccgcacactctcccgcaccggtgtgttatcgatatccagtcgcagcggcaaggtattaataaacagccccatcccactgtctgccccttctcccgccgccatacgcccgaccagcacggtgccgaacaccaccttttcctgcccgctggtacgtgacagcacctgggcccaggccagatgacacaacgccgccaagctgacgcctaactgccgggcctgatggcgcaagcggtcattcaattcaggggccagcaaccggtggaactccgttacctgcgaaccatcacgatgcacttccgtcaacccaaacggcaacgtcggctccgccacgtctgccagcatatcgataaagaaacgggtgtgggcggcctgactcacgcccagccgggcctgcgccaccagatgacggaatggcaccggtgcagacagattttcttcccgccctgccagataagcctgcacttcacggtgcatcacctccagcgtcgtatggtcaccaatcagatggtggtgcaattcctgtaagagccagtggccgctttcttcccgggcaatgacaaactgcagcagcggtgcctggctcaactcgagacgacagtggcacgggtcaaaacgccggtttaactgctcaccgaccgggctatctgccgcatccagcgtcagctctgtcaccgacacggtggcctgacgccagaccacttgcgccggaaccgataccccctgccagataaaggcggtccgcaagatatcgtggcgatccaccacctgctgcaccgccattaaatagcgctccagcagggcccggtccgcaaacaccatctggctggtcaacaaatacggatcaccctcatttgccagtaaatggtggaataaaatcccgtcctgcaggggcgacagggcatagatatcctggatatttgccatcccacccggcacttgtctgacaatgtggtcaatatccgcctgcgtcaaatccaccagtggtaacattgccggcgtcagttgccgtgtcgtgggggtaatcatattcggtgggatttccagggtctgatgctgtcccagcgtttgcgccaggtctgataacactggtgactgaaacaggtcgcgcaccgccagtgtcagccccagctggcgcaggcgttccaccatccgcaccgccagcagcgaatgcccgcccagcgcaaagaaattgtcatgccggctgacttgctcaatgcccagcaggtcaccccaaatcaccgccagggcgttttccgtttccccccgcagcggcgcataagcctgccgggcaaacgagtcatcatccggtaccggcaatgcccgacggtccagcttgccgttcagggttaatggcagcgcctccagacgcacaaacgccgccggcaccatatagtctggcaaaacagcttgtagataagcacgcaggctattcgctagctccacatgagcttctgccaccacatacgccaccagccgtttatcctgcccttccccctgagccacgactacagagtcacgtaccgccgggtgttcggtcagccgggcttcaatctcccccggttcaatgcggaagccacggattttcacctgctggtcagtgcggcccaaaaattccagattgccgtccggcaagtagcgggccaaatctccggtgcggtacatccgggcatggggtttaccactgaacgggtcagccagaaaacgttctgccgttaattcaggctggttcaggtaaccccgggccacacccacgccgccgatatacagttctccaatgcaacctaatggtaccggctgaccgtatctatctaacaaataaatacaagtattgcttaccggccggccaattgagccatcatcctccgaggataatatcgcctgacaagtcgcaatcacggtattttcagtcggaccataagtattcaataaccgtgggtgatgagtttcctgtgcaaaccaattctgaatagcccgcgttttcatctcctcaccaccaataatgattaatctgagacaatccggtagtcgtaatgccttgtctctacccgccagttcagaccaaaatagggtcggcagagacatcaccgtgatacggttttgctgagttaaagaaataaacgcttgtatagaagacaaccagttatcatcgcgcatcaccagcgtggcaccatggcataatgacgagaaaaattcctcgactgacgcatcaaatgcaaacgatgaaaattgcagtatccggtcttgcgccgtaaccgcataagtctcattaaggcccagatagcgttgataaattgcctgatgttctaccattacccctttaggcgcaccggtcgaaccggaggtgtaaatgacataggccagatgacaggggatcaatgccgctatctgtggattactgtccggttgctcaggcaggctattcggatcaagcaccttccgtccagccagcgccttctctcccaaagctgtccgtcctgtctcatccgccagaataatagccggggcagcatcggtgagcatatgcgccagacgctcaccgggataagccggatccaacggcacatacgccccaccggctttcaggatggccaatatcccgaccaccatggccggtgagcgtgagacacaaatcgccactaactggtcgggcacgacccccagcgtaattaattgatgtgccagccggttcgcccgggcgttgagttccgcgtaactgagcgactgattttcatacaccagggcaatggcgtccggggttgtcgctgcctgccgttcaaataactgatgaatacataagtcttcaggatacggcgtttccgtggcattccacgtttccagcaataaccggcgctctgccgatgtcaggatatcaatttccccgatccgctgttggtggttagcgaccatcacctgcaacacagtccgcaggtagccaatgtgtcgttccatagttgtctgatcaaacagggcggtggcataacgtaaattacctgaaatcgcgccattatcctcaaacatatccagttcgagatcaaatttgacagtatctaaagtttggtcaatcggtgacgccatcaggcccggcaatgcccagtccgtgtgttcattgctctgccaggcaaacatgacctggaacagcggcgtatgcgccagccggcgcggcggttggacaatttccaccacctgctcaaacggcagatcctgatgggcctgggccgctaacgcggtttgccggacttgggtcagcaattcggcgaccgttaatgcacccgagaagtgcatacgcaaggccagcgtattcacgaagaaccccatcaacgattctacttcctgccggctgcggccggcactcggggtgccgataataatatcctcctgaccggacagccgcgataagaccacgccccaggccgacaacacggtcataaacagggtaaccccgtgctgctggcttaactgtttcagggcggtggttaattcgggtcccaagtgaaccggtaatatctgaccggcaaacgacggctctggcgggcggggacggtctgtgggcaacgccagcagcaccggggcatcggccagtgttgtgcgccagtagtccgactgcacctgggtacgttcggcggaaaaccactgatgctgccaggcggcgtaatccgggtactgaatggccaatgggggcagcgggtccggctgaccggccagaaaggcggcgtagagtgcgttcagttcatttatcagcacattgactgaccagccatcggacacaatatgatgctgggtcagcaaaaaacgataatcctcttccgtcagtcggataagttccgcccggataagcggtccccggctgaggtcaaacggtgcagacatttctccagcacacaggcgttctaattccgtgtcagcatccggatgcccgcgcaaatcatgctgtaccagcggcaacccgtcgtctgccgccaacagatgaatctgaggctgaccgtcaacggaaacaaaaaccgtgcgcaatgcttcatggcgggcaaagacggcattcagggcctgctgccaggcggcgatatccagccggccgcgtaaatgcagcgccagggggatatgatacgtttcactgaccccatcgagctgggccaggaaccataaacgctgctgggccaaggataacggcaaagtttccgtccgggagaccggcagtatggcgggcaaggcgggccggtcttgtttctgtgccgcctgcgctaaggccgccagcgaaggcgaatgaaacagcgccgccagcgggagctccacacccagtacggtcattatccggttcatcacccgtaccgccagcaaagaatgcccgcccagggcaaagaaattgtcatgccggctgattttttcgatacccagtaactctcgccagatcgccgccagggcagtttcggtggcgccctgcggggctgcataacgctggcgggcaaaggcgtcctccccgggcaccggcagcgcccggcggtccagtttgccgttcggggttagcgggaagcggtccagacgcaccaccgccgccggcaccatatactccggcaaaacttgactcaggcgctcacgtaagttattcaccagctcttcttccacgtccgccgccacatacgccaccagccgtttgtccagcccttccccccgtgccagcaccacagcttcacgcaccgccgggtgttcggccagccgcgcttcaatttcccccggttcaatgcggaaaccgcggattttcacctgctggtcagtacgacccaaaaattccagattgccgtccggcaaataacgcgccaaatccccggtgcggtacatgcgggcatccggtttatcgctgaacgggtcggccaggaaacgttctgccgtcagttcaggccggttcagataaccccgtgcgacgccttgacccgcaatataaatctccccaagtccccccagcggaacaggctgaccgcacgtgtcaagaatatagatacggttattggcaatcgggcgaccgatgggaggcaaagtgggccaccggttcggatcctgatccagaatgtatgccgttgtcacatggctttcagtcgggccatagtgattgtgtaagcggcaaccttctgcacgttgcagaaaacgctgaatggccggtgttatacgcagttgttcgcccgcggtgacgatatgggccagacaggaaaaatcttccccgctgtggctggctgcttccgcaaggtgctggagtgcaatatagggaaggaaaattcggtcaatccgttgttgcgagatcaggcggagaagctgttccggctgccggcgcagggactcattaatcagcaccagacagccgccttcacacaaggtggtgaagatttcctgaaaagcgacatcaaatcccagtgcggcaaactggagagttttaccgtttccggcgggttgtgacggggattgacggtgccattgtagcaggtttaacagacccgcctgcggcatctccacccccttaggtaaaccggtggaaccggaggtgtagataatgtaggccggatggcgtgatgtcagccccaaagtttggggttccggattatggtcaggttgttcaacctgtgcagcgtcaggggcatccagcagtacaattgtgtagtcagccgcagagaatgcatgcttcgaactgtcagcgagcacgctctgggtcagcaaaaccaccggtgcggcatcgttgagcatatacgccaatcgttcaacaggataacttggatcgagcgagacgtaagcaccgccagcttttaataccgccaataatcccaccaccatggccggtgaacgtgagacacaaatcgctacccgctgatccggctctacgcccaacgcaataagttgatgggccaaccgattagcacgagtatttaattcggcataactcagggactgattttcatacaccaaagccgtcgcttccggggttttcgccacctgttgttcaaataactgatgaatatacaaatcttcaggatacggcattgctgtcgcattccaggttttcaagagcaacatccgttcagtttcagaaagcaaattaagctgcccgatggggatggcttcatttgtcttttctaatgacaataactgctgcaaatgttcactcatccgcaggatcactgccgtatccagacgattttcatcataaatccaacggaaaccaccctgtgtatttatctgaaatgtcagtaattcgctagacctttcctgatcacctaaccggctatccggcacgacagagacagctatcggccatggatagcacgttcttaattctgggataacggacagtgcaggaaaacgcgaaaaaaggtcacgactgtatgtgccatgttgtgccagcagggccagttcattatcaacagcgacaacaacctcactccacggtttattaaattcggcttcaacggtcatgggcaccatcgatgccatatttgataactcctcgtttgctcccacataccaaccaacctgacataccgtttgctgggtcaaccgcgtcagatagataacgaatgcctgtaataacgttttccatgtcgcttcctgacttttttgggaaaacgcagattgccagggacttattgcccagcggggttctgctgtcttatgggagatatcgaaaggtaaatggctgggttgccagccggtaagacgctgacaccagaaaggttcatcaggggcgaacttttgaagtgtattcttgatattctgtgcctgttggggcgaaatcaaaggcaattgttcaccgggttgcagttctgatatttctgtcagctcacggacagacaataactggccttccaatgtggaaaatcccccgatccggacatcctcactgcccgtcgacacctgccagccctcctcctccacacgaatcaacgtccccggtttttccccagaacaggtacccaaccgctgaagccaggaaattcgtaccgtatcctgttttaataacagttttgggtaacctaatggattggcgtcattctcgccaaagtctaatgcgcgcactaacgcagacaatacctcgcccggctgtttccaacataagtacccacccgcctccgggcgatgcgacagcgcataaaaacgccgttgcgaaagattttgcgggtaggttattaatgtgtcgtgactcagcgctgttaagagttcattaaatcctttctgagccgcctgataacatttcagattcaataaaaaagccgtatcctgttcttcaatcgagaccggccattgcacagcaatgtttccgccattcacagcgccttcaatacagtgccaggaaatggcatacgctatttccctcgctaacagcgcccaggacgttgcatggctacctgcataacgcggcaagggactgtcatgataattaaaagcgcctccgcggatttgtttaattaatgaggcaggcaaaatgagaggattgacaatggagaaaagccagtcaacaggctgtaactggatgtgttcttgtaattcttccaccgaattaacccaatcaatcccctgctgctcagcccatgtttgcaaaacactatctgtagataacactgcttgtataatatgtccagcggattgaatttgttcagcacaggacaccgcaagggatgtccccccgactacaacgcattttcgtgatggaatcggtgtctcatctgtatgatgtggggtattttcatctaacttctgagaaagtacttcgcttttaaacatatttccctctgtagcaatgttatctttcatttattacctcaataaatttattggttattttaagtgtgttaatcctatagttatcataactatttattattactttctatttcattgagctgaggataatatcattaattaatcaagtattcataaaatatttatgacaacatttcctgtcagctttaaaaaccacacagcccttcattgaaaaatacaaacatcatgacgtttactattaatatgtgaacccaagaacaaatattattttacatttaaaaatcaccatgaactttcaaacaataaacatgaaccacactaaaataacacataaaaacaaccagttaatataaaataataaaaatcacaaaaacagatacagaaaaaactcataacttgtttttcataacgatttataagcaacaaaataattcagaaaagatatagtatctataagtggttatgaaaaaccaatttttttaaaacctgttatctttctgtttcgcttgattgtgtatatacccgtaatcattgaagatgcttgattttatccgaaatggagatcattatcctcgctatgaaaatatttattacatcagaacaaaaaatcaaacttgagcgtcttcacgacacaactcgtgatggtcaagtacgagacagaataaaagctatccttctgacttctgaagggtggagttctgtgatgatagcccaagcattgcgactccatcagaccaccgttgaccgccatatcggtgattacctcaatcggtcgcggtaggaatagccgttgccgcagcccctgctttattcgcttcagttgtgtttgacatcgttttcgttgggttttgcgcatcaccgcatccttgcccgtgtgtagtcgtcctatataatgcgtcaatcccagaaaatcaaacgtccccggcttgcccctctccggtcgctcctcatattgctttaacgcaaagcgaccaaaccgtaccagccgggttttcgctgggtgtaccttcagcccaaactgcatcagtcgtcgttgtagcagggattggcacgccagagcatcctgatgtttctggaagcccaggactggtcgagtcgccccggggaacctccccccaaggcgctcacggaaccggacgtgaacgtctccgctcatccggctcttcccattgaagcctgcccccatagtagcggccagtgggcaaataacctcgtttcactccgcgcaacacgcgccagccagtgactggcccgtcgccggtggccccgaagtcgcttatgtttacgggtcagccataacacgagtttgcgatcgatttgcctcagcgttggatacagggccgatttataaaaagcaccgtaataatttatccagcctctgattttcgcattgaacatatgcgccagatcgtacaaggacttgtcactgcgattttgcagaccccaactcctcacctcctgacggattgctttccctgctctggcactcatccccggactgaagttaacgaaggtcttaccccagcgattcttcgacaaacggggccggaatgtatagcccagaaagtcgaagcgcgtctctgcgtaattcccccgtcgatcggcatctttacagtaaaccatccgggtcttctgcggatgcaactccagcccacattgcgcgaaccgctggcctgctttacttatcagtgcttcggcctgcgactgactgtgacagtggcatacaacatcatcggcatacctttcaaaggggacgccgggaaactgacgtttcatccacatatcaaaggcataatgcaggaacagattcgagatcagaggtgaaatcacgccgccctgcggcgtccccctgttccgtacctgcacccttccatccggcatttgcaccggcgccttcagccagcgttcgatatacatcaccaaccagcgttcctgtgtgtgatgccgcactgctttcagtaacagggcatgatcaatattatcaaagaaccctttgatatcgatttccacaacccagtcaaactgccagcagcgtgttctcgcctgcgcaatcgcctggtgagcagatttccccggccggtagccatacgagtcggcatggaacagaggttccagtacaggctcaagtacctgtttaacgaccatctgggcgattctgtccgacacggcaggaataccgagcggacgcacaccaccatcagctttggggatctccacacgccttaccgcctgcggcatataactgcccgaagccagtctgttccatagcttgtagagattgtctgcaacattctcgtcaaacccggccagtgtctgtccgtcaatacctgccgcaccacggttagctttcactcgtttatacgcatcccacacctgtcgcttactcacaggaaatggctttgccgattttacagcagtcctcccaccggctttatcgcccgtggttgctgtcgtgccatcagcacaatggggcaagccctttgctccagacccattacggtccttcaacgctactacggcttgctccgcccctgtaccccgcattggtactctggcgctcatgggacctccacttgcgtttctcccttctcatcggggtgacaggttcccacgttccccacaagagcctgaatcgacttcacgccgcctttatgccggatgccgcgcaggcagtaaacaggtcgcctcctgcgcttatcccacaggaacgactccaccatggttttgacatcatctatacgctttcgacacatcatcaacggttcactttcgttcgtctcttcgatccctacctgatcggatcatgcccgaccttttcccatctcgctcaccaccacgtctcttaaacgcagcagcagtggggggtttgaagccatttcctgtaaaacggcttcgaggggcctgccctcatctcttgtgttgcatagctgcacggggacttacgtccccggtgcatgccttcgtggcacaccatcatcggcgtatcggatcatcaccacctctccttgcacccgctttcgccatgcgttgagccagagatcaaagctgtagtgcagatagatattcgccagcagtggcgatatgacagcaccttgcggcgtgccacaatgcgacttctgtcggtgaccgtgttcatcaactatccccaccgtaacccactgcctgattaatcgcaccatccaaccgtcccttatcctgagctgaataaaccggatgagccagtcatgttccacggtatcgaagaaccgactgatgtccagatccagcacccaattgactttcctctccataacggccacattcaacgcgtccagagcatcgtgctgccctctgcccggtctgaacccatacgagaagccgagaaaatcggtctcgtagatttgatttaagaccgtgacagccgcttgctgcacgattttgtcctccagacacaggatactcatggcctttctgtcccgtcttctttcaggatcatcacctgccttgccggctggggcctgtattgcccccgatgaagtctgccgtggagcgcatggaggttgttttgcagattttctgcctagttttcccatgtgataccctcgcagcccggggcagactgacgtttaagttgctgaaaactctgacataaaagttcttcactgatgtgatgaaaaaggtgagtaaactgttgtttcctatccctctttgctgcttttcgcacagccagcaggcgtaacgtcgtatttccccggctctgtgtccggatacgggcgcactgttggctgttccccttggtcgggagccttccctccatcaattccgccacattgttctctgttttgttcactgatttctccggtactatactcccgtccgacttcctgaactccctaaggcttctgctttgacacttagaccttatcgtcccaactgctcacgatgggaaaccgttcaggatctcccaggttccgtgcgacgaacttcctcacatgcacagggtctccgactccgggaggtatgatcaggtttcgccaatacaacctgaccattgtgggtttctgcttaccttaactgcatcaccacctccgatttaccgatttcgtggctcaatacctggcctgtgagtgccttcgctaacacttcacgacaggagttacccacagtcgcgcatagctaaaggaccgagcgagtggctagctcttacccggaaaggactttcaccctctgttctatcgccagcttgtctggcgtactaatgttccgttgaactcaccttgtgttgtcagataaccacaaaatgggatgttaacggaaaggattctcaggttagagcgttttgctctcaatccccttgcggttgggttggatgcgggctattttacggccccggtttgttatctgacggaacagttaggcatgacgcccattatcggttatcgccgcccaaacaagggaccgaacacctttcagaagaaacacttcacctatgacaggcagcaagattgctatgtctgcccgcagagcaaaaacctgatttataccacaaccgaccgtcagggataccggcattatcaagcgccggcgactctctgccagagctgtccgcagcgtgatgcctgcactcacgcgaaaggcggaaaaatgctaacccgccatgtctgggaggccagtaaagagcaggccagagaaaaccgattaaccccgtgggggaagaagctctataagcgaagaaaggagacgatagagcgtagttttgcggatgcgaagcagcatcacgggcaccgctatgcccgttttcgtgggttgcagaaagtgcaaatacagtgtctcctggcggcaacagcccaaaatatcaagaagatagctttgctggtcgcaatgctgtgttgtttttatctctggagagcgagtattttattgcaggagaagcgaaaatagcgccctggcggaggattaaaccgggttaatgaggaaaatggatggcattatgattcataatgaaaggaacaaacctcgttaaaaataacgaggtttgtcagcggtctggatgagaagattttatcttctcatcatttataacggtgtccagttttatttgaccgttgcaaactgccaacaattgtgaacaaaatcgggagtcaaccccctgattgaaggggagcctatatgcaccaatgtacgttctatatcttcttttagtaaacggatcacctcactgacgccttgttcaccagtcgctgcaaggccatacaataccgcccttcccagcaacaccatatttgctcccagagccaacgctttaacgatatcagatcctcgacggaagccactatcgatcaagacaggttgatacatcgcctgtaccgtggcacttaacgtttccattggggaaagtgtgccatcaagctgtctcccaccgtgattggacaggatcacaccatcagctcccagttcaatacattttttagcttcctctggtcggacaagccctttcaccaagagcttatgtggccataaagctcgcaactgttccaagctttgccagttaaagctagcatccatttgtcgactcattactgcgacctgaacatctacgcctatgttctccgtcatgacgaaattcgccaattgaggcattccgttacataaaaagcgcagcaaccagcttggatgaaggcagccgtcaagcagcacggcgggacgatagcgcaaaggcagacagaactggttacgtatatcccgttcccgatagccattaaccgcaacatcaacggtaattaccaaagtggtgtaatcagaggccaacgcccgcttcaccatttgttctgccagttcgggacatactacataaagctggaaccatttttctccgtcacactgtctagccacatcttcaattgtcatgttcgccgcactggagagtataaaaggaatgttctctttcgctgccacccgggcaagaatcaaatcgccatttggccgaaaagtggcattaagcccagtaggagcaatagcaaaaggtgctgaccataccttattaaacaaagtacatgaaatatcccttttactgacgtcaattaatcgatggggtataaaacgccagcgatcaaaaatctgctgattatagcgtagccctttttcatcctccgcaccgccctctaggtagtcaaaaattatctttggtaattttttcttcgccaaagtgcggtaatccgccacgttaagtaatttgttgctcatctgatttctgtgcaaggtagtcatgttcagtctgttcaacccgctgccatgtattaaaagattcactttatgctgtttaagctgcgtcaaagtgggcggttcaggttcccccacccagcaatttatggatcaaattgaaacgatatgcccttctttatcagtgacaatactggctggcttaccttcattcatttattccctctgggttaataatgctacggacaagaaacagctcttctcatctcatgagtttttcctccgatcggcaataaagcaggacaatcgacgcaccccctcttcaatcaggtcagattcaacatagctgaaagaaagtctgagtacattgttgtaacgatctgaattggaaaatatcgccgttggaactacaatcacgccaaactcagcagcacaacgctcaatatcctgcatagtcaggttgaaaggtagactcaagttgagaaaaaagccgccattaggcatattccatgagatagtggagtctttttcagcaaagaaacacgttaggctgtgtagtaatcgatcccgctttgctcgatagtgttcactgatattctgcgtgatttgctttaatgaacaattattttccagcagaaatcctcccacaatagcctgagtgatttgcccggtatttacggaaataaagcttttcactcgggtcatatcattaatcagtggtacagccagctccccccgttttacgtgagcccggcaaatcaaataaccaatacgcaccgctggacataatgttttggcaaaagtaccgatatgaataaccactgcttcgttatccaaggcaagcagcgtcggttgttgatgatgcgtataatcaaacagacggtaagggctatcttctaaaataaacaattctcgtgcataacaaaaaaccagtaattcttttctccgtgccaaagacatggttctgccacaaggattagaaaaatcaggaatagtgtagatggcacgtgcacgctttcctgatgcagcgatgctattgatgctgtactccaatgcagagataatcggtccctcgctatcgcactcaacatacaccacgtcaatgcctttgattctggccgcaccggtaataccaatataagctggatctgtcaccagtaatacatcatgcgctggagagaacagcgtatcaaggcagataaccatcccttcctgagcaccattagtgaccaaaatctcttccggctccagcgtaattccctcatcaagatatagctgcttagcgatcaatggattaataatgccgcgcgtatcgccatactgtccaagcaagttaccaatctcttgatggcttttattacgcgctccggccagatagtgggaaaacagcgcaatatactgcgaccatttttccggccgagcattaatctctgagggacgaccagaggcaaacgaaatcgcattaggatatcgctctatgacttcattgagaaaacacatcgtgttcaggtcagcgtgctcctgaaaagccaagtcgcttgcttctattgccagaggcataagtgtctcctgttactgttattaaatttgttgtgtcttttccaactgccggaacaagttgtttatattctcttcttcaaatccttcaccatgcctctcaagaaactcaaacatcattcctgactcactgtcacgtttggtgaaaatctgtttcaagttaccccccctaataatctgcgtggaaaattcaatgccgttttcctctaattcggctacgacttcttccaagttctccacctcaaaagcaacatgctgaacaccaggcccatactgttcaacgtactgtgtcacctgagactgcgattctgtgccctgtaatagcaccaacgtatagccatttccttgtaaaattgcggattccatcgcggtggttacaccctttgttactcgacgttccacaagggtaaaaccaagcatctccacatacatgctcaacgctttatccagtgacacaactgcaatagccaggtggtcaatctttttatatttcttcgctatccctgtgagggaaatgtgattttcggtcataatctttatcagaaagttaaagttaaagtaatctattcccatgcttagtatctctgggaacatccaatttaaaacgccgagcatcccctcttaactactaggaggatcaaacgcatcaacatctgatagcaatgtttcaagttgtacagcaaattgccacaactcccgtgaaaaaacaggccattaacaccacgagaaacggaataccggattcagttgctacaagcaatcgttcatgtattagctgttgttttttctgcaatatactagcaatcgctagggagcatcttgctagttcatcgaacgtaatattctgttctttatcccagctttttgtcagaaaccgataagtaagcttattaatatgaatatcacagcatcagataagtacactggccaaagtacccctgaattgagcataaatacctttccaaaattagcttataccgcacctgaaaaactgaaatatacactacaccaaacaatggttatttttccctaactctgtctcttttttgccaactactccacaagaaatacttatagatggtagattcgactaataagtgcgtaacgctgcaactgctctgggaagaatatggtgagcgtaaccctggcggattttacagttataaccattactgccgcctttaccgtgattggctgaaaacaacctcaccatcaatgcgtcaggttcataaagcaggtaaaaaactctttgttgagcagaagtggaggttcaggtcgttgaacgctgaatcatggcacgtatccggcatgagaccttctacagtcttgcttcactgaatcaacgtatcagagaattactggaaagattgaacaataaggtgatgaaaaaaatgggctactcacgtgccgaactcttcatccagatcgataagccagcactgaaacccctcccgattatggctcactgtcccaattgtcatgggttctatggtgccagttcaatggagcgtttgccaacagaacaagccatcaaacacactatccagaaatttaaagaaattaatcggggttagtgagagttatacttaagctatgtggaaacttagtactacagccgtaatatctgttacgttatgatgacgcattgttttcttttcctcaaaatacgggaaggtgcccaatatgccatcctagcagtccgcaacaactcagtctcacttgtctccggggcttactcaacgatgttaatgaaaaaatggttggcaactggctggacagaagcccccagatggcattcaatactttcttgagcgtgctgatcgaggcaaaagcaaccctcaatattctacgtcagtgagtgctgatgccgggcaaagtgcacggtgacgacatcccggtaccacatcaggccctgggaaggggaaaaatcgacccgatgagtatcgacaatatcgaataccctgtcggtgataatttatgcctttaaaccggaaaaccatccaaaaattttccggtttcatttgacaaagctattttatctcgtttttcgaagttctacgacgatattcaccactcgctttttcatgcagagtaaacaacatcggtaatagagaactcaacgcctctaggctatgcccgagctgacacaaactctctggcgtaaattcatggatgttattactggcaaacgacaacattgagtcaccaagaaaagttacaccatgacacatgcccatagtattttctttggatgattcaattaactgacacagtacagtatcgctaatacatgaaaaatccagtgatgcaatcgcatccgacatgccagaccataggatattcacatcagatatatcaccgtcgtcgggagtatcagggacgctactgtgcataatattgcttcccaattgatttagaaaaaattaaaaccaaagaaaagtctgtaagcaaggtatgtgcttcggtttctacattagattgcgcgttaaatgtataacgctttgagtatgaggatatgttactattcatattagccatagcattagctcttataatgttgtggttaggcgctctgattgtgttacagcactttcagagcgttgtttttatggttcctataactgtcacaatattctttctcttggagataaatatctcttccttcttttctggtaacgggaaggccaaatttcatcaggcttctgtcccaatgcatttgcaataattgtttcacctttacaccaaggtctttgcaaggcattagataacgttgacgatgccagccctgcttctctagaaatagctgccaatgatgttcccttttttcttaaagcagcgataatatctgctgggtgccaatcttttttctccacaataattctccaatcgggtataactatctaataatactgtaaaacgacgagtaacattctttgctttaaactctgttagtagtacgttttacttcaatctatatttcaattactctaaccaattgtcagtgcaaataatctttgggaaattattcgctggaacacaagtattgatccaaatttgaaaattgtaaagcaaattaggaccaaaaattccctgatttaaaaatattatctttagggaataatttttattaaaaatcaaccaattgaatgaaaattgagaaaatgaaaaacaaaaaagcatcagacgcttcttttagtgatgaagaaaaagaaggttttatcagtaggttattacaacttgtagggcaaagaaacattaggactgccgccaaagattggggcttgccttactcaactctcaataactacatcaacaaaggaacaagcccatcattaaaatatatgcaaattgttgctaataaggaaaatgtaagcttagattggcttgctaatggggataaaaatttcaaatttgaaacaccagatgcacactataatgatattgagttacgacattcctggaacttggtttttaactccttaaatctatgcgaagtagataagcttataaaattaattcatcgtaaaggtattgaagggctattaacaatggctcatgaaaagcaagatatcaaggatgtcattgataagcttcatattagatcaagcttgaaacaagcaatcaaaatggctcttgctggggatgaatcaacagataaagaaattttacgctgtatcactacacttgtaagtcaagaaacaaacaaaaattaaatacaatctaaaaacgaggcatattggaacaaagagaagagctagagtggatgtggatactgaaacaactgaacagattaaattacttggccccaaaacctatcactactcaataaagggagtgattggatggagcactatcgatataacagagaaatcagcactcaataacaacagggcgctttgttaacgtaccagaacgctcagccagctcgaaagcagctttggcacggcgcatgccctcgattttgcgctctcttatggacatttgcttaagttcagaaacttggcgttttgattgcataacctctccccatctcacctaaattgatgataatttcatatggtacaccaacattaggctgctgtaaaattcggtcataaaaactcttaagctttcgcgtttccgccatagcaaaatatgccttagcatcataaaattgatagtgcagaccgataatctcgctaaatgctttacccaacctcatcaagccctgatacccaagcttactgaaaatagcatctggtggtggaggtgcgtagaaatcaccactgtcaaaattctctagacggtcaaacttaacatcatagcaacgctcagggatggaaaaaccgacctcttccgagcgcatctggaggtattcaacatcagatatttcaacagcggaaaaaatcatcacaaaatcatgatcttctacagaaaaatcaaaccggtgatactggatttctccaacagtagcctcaataaatcctgtctgatgaaaagttggcattagcttattataggtagacgaagaaatgaatattgttatcttacagcaatctatacgtattaacaaaagctcataataaacatgaagctgaatagcaaactaaaaatatcgacaggttaaaaatacaactactaacttttcgtttaataagcgttatacacagttacaccgctgatattggttcgcctccccagctcaccaaccgctttcattcacccgaccctttgtggggtcaggtgaatgagctctatcagccgtgcaaatgtgcataacacacaactcgttttacaattcacaccatagacgccgctcagacttttagctaacctaaccagaaaataatcatattatttatctgaacattgtttcaacaagagactacccaatgactaaccataatgacatacaacgtacaatgcgcgctcagattcggggagcaaaagctgccaggatttatcgtaatttacgccagcgtttacgtacttgggatgaacattgtgttgccaaagcccacaaatacaatctccctagctggatgggacatatgcccatttatttacttgttagcagtatagtagtcactttgctggcaggagtactaatggcaataggagttattgtgctgatctttggactactactgggattttcactagctaaagataacaagcaagatactacctacagtgaatctctaaaagctaagtatcgaaatggttcagaaggttatggtttttactccaacggcagcaaactagatgattaaaaacagtgaaataaattatctatgccactgtttaatataatcatataaactatttcatgattttgtttgacaccgactctcccattctggcaccactagattgagcttcagaagtcccatgtcgcaacgctgtgttttctaatgcaccaccaactctgatacccgcccacgacaacgctcccatccacaatgccggcagcacaataaacatcgctcccatcacaaaactcataatgatatcgtctgtgctattctgaaaaccagccatattccagcggctgtgcgtatccgaaccatacaatgcctccagtaaccagctgtccaaccagcgtgccaattcccaccagaaggtcaaaaaattcagcgcaaacacaataaaagtcagcgtaacgaccgttttatattcgtagacagcaaatacgataatcaggggcaatatgatagtcaccgccatcagtataacagcctgtaccattggtaatgcctggcgcattgcatcaaacgccggaaatgccgccagactccccaacgacaccccgcccaatgaggctatccggcccaccgaattcatcagggtaaaatccgcgttaccgccgtaaccggcatagacatgtcccccttgagatgcggtcaagctttccgggctcaccagacgccgtatcaccgcttctttgtattctgacgtctctttgcccatcagtttcaatgccgcagatagccgaaaccacatgcttggttcaacctgcgccatgatccgtttttccaatcctacttgactgtctgaccaccattctttgcaggtcggatatcccccctgtcccgtattagcaaaaccatcatcacggtgcggtttccagggaaaatccgaacgaggcgtttttgactgaagtacatcataataacccgcactattcagaaacgtttttgaccctaaccattcaatatcccgtaataccacttcatccagggttcttccctcgtcccggcgtttccactgatacaatgccagcgcataacagccatgggtgaaatcctgtaatatctgagccagtgccggattattaatccgcgtatgctggacctcaaaacgcagttgcctcaagtcgggactgcagggaagagaagctattgcagcctgagtgacccctttggaaatctgatgaaccagtatccaccaaaccggagccgccgccgttttaccgtcaagcgacgatatcacggacgcataacccgtttcagccggtttcggtgtccaagtaccacaactttttgcccgcgagtcatcatacgtaatggtactcagactcacattgaccaacggcacacagcaagcaatcatgaccagaaaagcgccatacaaagtgttttcaatccgggttactgagagcatgcccttattcccttcatcctccccttcttcccggactttcagccagatacctatcattttgaatgtcaacggcagcacaaataacccggtggccagcagcacattccacaagccgttattcactatccagcccagcagggtcagaaaatattccagatagctgtaagttgtcatgactgatctccggagacgaagaacatggcatactcacaaaaccccacaaatcccagcgaaatgagtgcaatccgtttcagagccgctttctgtgttaacggcaatggggatcgccaaagctgccacatgaaacaggcaataacactgtacatggccaatcgccaagccagccagccgtaacgggtcgtgtacatccaatgttgtaaggcattgaactgagacggatacgccaagccaactgcggcaacaagtaacatgccccccatcatcaacgtgacgattaacccccgcctgaaatgccgtttcagtcccattatcaacctctgtttagtgccagtaggtacccggattttactttgctcagacatcattattgcccttcacgccctttcggcggcacggacaaggtgtgaatacgactgtcggtattatcggtggattgccgttgcagattcatttcaactcgattttgttcgcgctcaagcgtggtcagggcggtattttgtgcaatcgcccggcgcaactccatttcattcttcagggcagtaatttctctgtccagtgtcgcaatgcgacgatcactctctgccatcgcctgcgcctgagcggcggcattcggttctgcctggccggtcatcaacattcgtcgcatagtgagcgcagtctcaacggtgtcggccatcgccaactcactggccaaccgactcaccaaagccccactgtccggatcacgtttcagagcctggataaccccgcgagtcaccatcaagctacctgttttgagttttgccagattgactatggtaggcgcattttccccgctgaccagtttcatcaattgctcaatgttggtcctggtagcctcttccagcatcggtgcaaaccccgtcccagcgacacttgcacccggctggtctttggtatccccactggtacactgacgactgtcagtacaggtacgaaccgaacgatcacctaacaccttgacgaccgcgtctgcggcttcttcactgttcttgaatttctggcaagcagcgccattacattgtgtgcggttgacattggcatggctattcgccggcaggttgttcatcatattgaagccggcttttgccagatcccggatgggctgaatcgctttctgcccttttcctccccgtttttcacccccaatccaatttgaaccttgtgtaccgtccgcaacctccattttttgtgtcgtgccaaccgcatcaccattaccggtattcaccaacgttttatattcctccatcaacgccgctttagtccatttactgctatccgagaaatccatcatacgctgtgacatgttctggcaactcagttgtgatttgtcgaacgcaatacctgcctgtaacaccccgttggtcagcatttcatataatcccggattagcacgctggataaccattgcgggtaaactagctacggccccagtagccccttgtatcacttcccccatcaggtttttaaaccccgaagtcaggccattaagctgattccctaccgtcgttttcaaatcaaagttaccgcacatcaggtcactgctccaaccgaggtttaatccgcccagatgttgcagatgactgcgggtcgccggctgcgatatcactgatccgccacctatgttgtaaaacaacttatccgataccgccccattcaggcttttcccgtaacctatcgggctgtccgcaatggcaaaacctgccgcccgaacaacaggaacagtcataaacgccagtgctatcaatacaggcaaaaataatcgttgtctcatcccatgatcccagtctcaaaaatcggtactgtaaagaaaagtctgtccacgccgctgacaacaactgtagggttgccacaatgcaaagacataattcccgtccttggccgcttccccgctgttatccggaaaaacagcacaagaggtgctcattttcggcgctatacgttgccattgatgattttggttaaccgtattctcaacgacttcgcccggtggccagtaaccctgtttgtggttcccttgcaaggattgataaacatgcccctgtccagtacgggtgataatgtctgctacccgttgcgctaccaccgcagccgctttattatcatcctgttgtgtcacaaacccgcttcgcggataaacattgccccacatattgccccgaaacgaattacccagttcacgtttgcctggaataagcgcttcgggataaaacgactctggcacaccggtccgccaaaccaggctgtccagcgtactcaaaaagtaaggcataaaaggcgtggcggcacttttacacgcataccccgaaatttttccgcccatcatggcagttgccggatgcccaatcgcatcggcatatttaaaatgcagattgttttttcggttgcctgggattttcagctgatgattaccgccccccacggctatcccggaaagtgctctcgttacggcattttccacgccgtcaacagtctggctgaccagagacatttctctccagggattaccgccaggcgcgttatagacggagaccacggcctgaggaataaaatgcgcaacttttatcgaggtacgcactttacacccccagggagaacacagcagccagtaacagagaccttttatccgccaactgatgcacgataccgacgcggcactggacacaatctgagccgtattcacactagcaacggccactggcgccaaaacaaccgttagtatcaggaccataccgaactttttcagccgggaatgccatgttaatgacggtaaatctagagacttcatggctggttttcctgctgataggtatcccaaagtaaccgggcctgtctaacgtctgtcgtaccatacacaacataatcatcatcaaaaaccactgccgggaacttcttaaggcccagagtccaagcattcagtaacccctgataagcctgactgatatatcgctcctgttgatgccacgatggagactgcaaaatctgacgggcctgtttgactgcctgttgaggatcagcagacagcttactgaataactgtgattgcaactgctctggcttatctaggtacacaacttgcacgttttgatcagcattgagcggtggatggcttgtgtcggtatatatcactgtgctggcaaacacggataccggtattaacaacgggaaaagcgcccagaataccctgatattcatagcctgcactcctgcatggataagagatcctcatcacgcccatccgccacttccccagatatcagaccacgggcacggtccagccttcgcgccacaacaaaggcagcatctaattcgctgcaatgaagcgttttcataatcgccctgcgctctgccttttcctctttctccgtcatgcccagcgccagatacacactgggcggcaccacccgaaataacgcctccacttttttcgacaacaccacgccttcggtgtaacaacccgggagtttgctggctgatagcaacaccgatttttgttcttcagacagctttttaaaacgcgctatctgttcgacttcatccggcggcattgtcaaacacaaccaccactccgccatattgagcattttctcagccgtatccggatagtccgccaaattctgagtagccagccacaaccaggcccctaattttcgccacatcttgaccactttggtcatataaggtgacaataacggattagtggtcagaacatgcgcctcatccacaacaaaattaatttcccttacatcaaattgatcacgttccgccatattgttgatggtattgaccagagacaccatcgccaaggccatctgcgcactatatccttcacgcgccagcgtaccgagatcaattagcgttacatcggcttctggccaaggtgttcccggacgattaaacaattccccctcaaaaccactggtgaacattgacatcgcccccgccatctcttcagcacgggcccgacgctgttcggtacacaatgctctcccctgttcatcccgccggctgtcccgggcaatcacagacaatgcattttgcaaatcttccgcaatcatctgtcggccgtcatcaaagctggctctcgccgctatcatgatggcttcacgtatcatgccccgatccgcccgcgtcagacgttcttcctctttcttctccccaccggtgatcatcatgcgcgccgcaagttctatttctcccaggatatcgcgctgctcatcggcctcgtcatctgcggtttcctctgccgacctttcacccgccaaatccaactgagaagatgccacttgaagcaattggtgggcatcggcaaacagcgccagactgacaccacaacctggtttaatgctgattttgttgacactcagccccaggcgttgacagtaatcggcaaacagcccaaaactgttgcccgcttccgccacaaataatcggggacagtgcaccgccatcaactgcgataaactcgcacagagcgtagccgacttccccgcaccggtcggcccgaacagcaacagatgcgcattctgggtacggtcatgtttattttgcggatcaaatgtcagcacatcaccgccccggttaaaaaagctaagacccgggttgcctgtgccggtcgcccgccctgtcaccggcaacaacccagccacatgctgcatccaagtcaaccgggtataccagtgatgtttgtctcgttgcgggttaaaacacatcggtaaggcacgcagataaccgtttaacggcgcgacgtcgcattcgggtttgaccggctgcaaccccgataccaacagggttgcggccagttgctgatgccgacggttcaaatcgtcaacatcagccccctgtaacagaaaggtcagtgcagaacggcacagtttatgtctcagccccagatgtgccttagcttcttttacgtctgaacgtactctccctgattcagtattttctcccacggcattttttgacaaccggtcgaaatcctgttctagcgtgtcttgtgcttgtgcgaccacagtcagcgaaacaatagttcctgagggtaataagtccatcagtgcattgatattctcccctctgaccatttcaccggtcagcgttcccggctctggtggacgacgcagccgttcaaccggtaccgctcggtgagcaatattatcaaaccaccatacaccgtttttcacgtcagaacgtggcggggtaaaccacaaggtttccgtgaaatcattatctggcttcctctcaccagcctgtggggtagcataactagctgcctgatacaacgtcgctttgtctatccaatctggatcaggattgaataatcgcagtaaccagtgatgaacctgttcaccattttgtcgttggcacaaaatacctgtactagccagcgaagctgtcagtcggtcacacacctgattaagcaacacaatgggtagcaagctttctttctgtccgacaggggcccaacgataaatgaccatccgggtacgacgttgctgtccccgccaggactgaccagtcaccaatgaatcgttaaacagcccttctggtcgggctatccccttcagatgacgttcggtttcagccaaccaagcttcagtgaaggctgaaccctgcgcccaaggtttaatatactgacgaagttgtgtcagatataacgcgggatcatcctcatcctgacaaaaaaactgcactacccagggagatacgtcatcgtcttccagactgtcttgcaacgcatcttctacctggtcacgaatatcttccagacgggcagtagtgcgtccttctgtcgataccggggaaacagcataaatagcgccgactgaaagaccatcatccagcaacaaacacttctcatcgtccaaatattcgacccaaggcaggtaatcaatgatagacggccaagtgtcatacaacgcagcttcatccgtgctggtcattttgccgggacgcctcaaaggttcacgcccaacaacggtagaagacgacggtagtatgacctcagtttcacccaaaacttccgatagattatcccatttacgcaagcggactttattcaacagcgaccacatcacaatgcctccgtccgttcacccagcaaagcatattgcacctggttgtagaacgaaaacaccgtgctgtatcccggtactggcgtgtttcccgcaactaaatgaggaaagaggtacatcaccatgtctggattgggcaaccgagggaaagtctgactgatttcattttcctgtgtacggctataactttcagtgtaattcagagtagcctgctgttcccgttcgctcagctcccggcgcagtgttttacggaccttcattgtagtctgtgacgacgaggcttttccctgccacagagctagcattgtgctgtctcccggcggaagcatctcttctttagacgtgctgcaaccggtcaggatcgttatcaccaccaacatcactatttttcgcgctttattcatgctcgttttctcagtccagaccatcacggacctcctgtccaagacctaagttatatttcaccctgcgtccccgctcttcataatcaatcggtatttgctgggtaatgtgcacggctactctggcacccggcggtacgtaaacggcatcaaaagtttggccataacgagctttgacccattcggatacggccttaaatcctccggcagcggcttgccccaaaaccgctttaccggcatccccggtcagtgatgacgtcgcaccgccataaccgttagtctgggtggtaagctgactctgtgacaacacatcgcccgcagctgtgccaccagaaagagcaaataaggttggtaaataactggatgcattggatttacgttcaccgctgatacacggaataccgttgttgtcagatagccagccgataccaccgctgctattatcctgaacgtgatggctgccattggtgcgattatccgatttcggcacagttctgacggtaccgtctgcaaagacaaaagttaaagatgtgacattgccgcgcacgcaagacaaggtccagtcaccggtagccataccagaaacaatcgccccttcgacatccggcaattcaatgccgttggcagtcaggttatctttaccaatcagtaccttaaaaggatacgggtcagtgactttgtcatttactggcacccggcctaataatgcagtcatcgcctggctgccgaccagcgtcgtattctcgggcagggtataaacgggccggataatctcgtttgtatgatcctcggtaatggctcgctgatttttagttataccgtcatattccactttctgacggctcaatgcattgtcctccagaaatgacacgggaaaacggggggacgctggctgaccgctcattgcaacctgtgaatcaaccggtaacgtatcctgtggggtaatccagaccaaccggtccccgccagaggtcgtattttggccggtattgtccaaccctaatcccagcggaatatcacgctcaaccagagagttgtttatattcatgcccttattgcctaactgacgggtcaactggtcaagtcggctgaacagcgtttgctgctccgctttcaatagctgctgttgcttttctgtttcctcacgggtacccgctaccacccggttaatctggtcagtcatgctctgactgccgtttcgccatttctcattgtccgccagtaattgtgcgttttgtttttccagcgccgcctgctgaacacggatactgcgcaaagctccaatcaaggtgcgcaacgtgtcttccggggtatccccctcaatccccaatgcccgcagctccccggaagacagttccgccaaagcctgatgactcactgtctggctgacaggcgtctctgattgccgacaactcttgatccccacgaccagccccgcaataacaaaagcaggcacgacccacttcaccagaccatttgacttaatttgcatggggatttccttgtcgcttcataggcgtttttgacctcaccggttcaggcagaaaggcacggtcaggccgacctttcaccaccaaatagacggtagtcgtgtcttccggcgtacccgacggccccaaccaacgatgctgaaaggtcgctgctatgaattgcccctgcaacctgcgtggatcaagcactacgttctcacggtgggtattacgcactttcagcgccaccacagtgaggttatccaccccccagccccctaacggggaaactattaccggcgcagagggatacaatgtggtcaatcggggcgacaatgccaatgataccgggtgaatgccgggaacagcttctactgtacgcaacggcgcatacagactctgcgcagcataacgggtcaggaccaccggcagcggagccgtataggacggtttttgacgccgggcggcctgacgttcaccggcaagagagggagacgttgctgacgtgttatcccctttggcaccatgatgaatctgatggtcatccgtcaacgtaatcacgtccccgtggtacaccacccgaaccggctcaaggggatcttttccatttgtagctgtcacatccagtaaaatcacttccccactttccacatcctgaagttgcagtcgggtctgggtaaacgtttcactcggatacagatacactgcaccaccggtgctttgtatccgcaatttgccatccagcgcacccggaaaaccgactcggacatttttatctacaaaaaccacccgctcctgcccaacatgcaaggcaaccggcagcgggatacgctcccacttcatcaactccacggcctcaacgggtgaaaccatcaccagcccggcgaataataatgcggtcaatgccaataactcgacgagtacctgtttgttcactggaatatcccctttttcgccggtgccggctgcgatgctgcttccagccgttgcggtgtgctgtcataacaatccagtgccaggccaaacgggttacgctctgcatccccttcccaacgggtgactttaagcgggtaacgtaccagtgcccgtttgaccggctcagcgtgaaaatattcatcggccactaaatctaaccgaataacccagttatcccggtcttttaccatcacattgctgtcacgaaagccccgttccggaatttcatacaccacccgcacgcgatcttttagctcacccacttgcgaccggttttgagcatcctgttccagaaatacctgacaggagggggtcagataaggagaaagcgccgctattttcgctggataatcgacttccccgtctttcggccaggcattcagttgctgaaaaatataaaagccaaaggcatagacctgggagacaggcacttgccaccacgggcgggtactgccactgcggacatccggcggcgtataaatggttaacgctctcggtgccatcagccagccactcagactcagtaacaacaacaaaaccagcacaccacaggccgcacgtaacgtcaggatatgctggtcccgatcttgaattgcatgacgaaaacggctcataaccgccccattcgggtcattacccggtgacggcggcgcaatgaccagcgttgtgaggtgataatcagtaacgggtcacccagaccccagcaccgctttttaacctccagccgtcgatagagataatgcgccggtttaccgcgtttcatccgggccaggtatttgccgccaaaggcaatcaataacaacggcgcaatcagtgccgccgtcggtatcatcacccaccccgttaccgatgccagtaacaagccaatgaccgcgccagctatcaatcccgttaatgccgtccagcccagttctggggtagtaaatccccggaacacgacaggttcggcgttaagacggtcaggtaaaaaacgaatagtctgaaccatactgacgctttcctggggttaaaagagaatggacgtcgattttcccagcagccagataaccgccactaacagcaccacgccaaccaccacaatcgcgccaaatttagtccaggaggctctgtcactgcgaacttcagaaaaagtatggattgccgcggtcgccacattgataaacgcgatcgcggcaacgaccagcccgcctatcacgatgccgtcctgcaagtaacctttgacggtattaaaaataccaccgccactcccgctggaaggcggttcaaccgttggcaatgccgctgtcacgggttgacaaaccagataagccagcacactgagtgacactgcacaggtattgatacgggcaaacaggcggaacagtgactgacatccccggtttaacagatccatttccttttcccttttttccattacaggttaaaaaaccgattagctggcaaacatccagatagccatcaccagcaacaacgccacacgaatgacaaaacggttcatcgccgcttcacggaccttttcattggcccagccctgccagacgtctaccattccccatgcggcccagagaaatagcaccgctatcagtaaaccgatacagagaaattgcatcacatgaggatcgagattgccggaagccgccctgaatgcattgcgttgaacctcgttcaccgtattcgctcctgacgatactgaccggtcacatccagcgcagccgcagaaatcccgggctgggcacgggagggggtcagatagcggttaatgccttcacggacaatattgaggtcccggttagcacgtagataatcaaaataaaaacggtctgcctgaccctcctgaatggccaaaacccgggcacgttccaaactggcctgcacctgatcaagctgtttgagtgtggtggccagctcatctttttccccagccagcacaggccaactcattagtatcgtcaggacaaaaagactatgggaaaataaacggaaataaaccatagcattaccctaaatctgcgtagatatatacatcaacagagtgacgaaaaagggtaacgattacagtgaataattgtttatctgattttaaaaattttggatacttgaatttaaggttgaaacagagctataaacatcctggctcacttaaaataagcgggttgataattgatattttctcatatcactactgaacacaactattacctgcttgagatgaatgtaaccgtctggttcttggacgacaggagcactatccggtcaacagtggctcagaccgaacggcaacggagactggaacaaaccaacgaagggcgaatcgaagccaagggcgtcaggttccgtctataaaccgacaacaggttttgataatgaaagatgagggatttggggcttctgagattgccaggcaactggatattaaccgcttcaccgtctacaagatactgaaagaaacaagataatcatgacatcagaactacagatttacacttcgttactcaccgatgtaaaggaacggatccgtgggggtcagttcagagccgctcagtccgtcaatgctgaactaatccagatgtactgggacatcggtcacatgctccatgagcgtcaggagcaacaggggtggggagcggggatcatcccgaagctggcacgggatattgttaatgaattgccagaggtcaaaggcttctcagaaaggaacctgaagcgcatgttacgtttctaccgggagtacgccttgccacgaatggagcaacaaggttccggaaagcccgtgtcgacaattgtgccacagcctgtggcacaattgccgtggggtcacaacattctgctgatcgagaggataaaggatcaaaccgagcgattctggtatgcagaacagactcagatacagggatggagccgagactccctgcttcatatgatcaaaagcaatgcctatgcccggcagggctcggttgtcagcaacttcaagaaccggttacccgtatctcaatcggagctggtacagcagaccctgaaggatccctatgttttcgatttcctcaccctatcggaacccttcaaagaacgtgagctggaaacggagcttctcaaacaccttgaaaaattcctacttgaactcggcgagggatttgcttttgtggggcgacaatatcgaattaccgtaagcgaacaagattattaccttgacctgcttttttatcatctgactttgagggctttcgttgtgatcgagctgaaacgaggagagttcaagcctgaacatgccggtaagatgaatttctattgctctgtggtcgatgaaaagctacggcattccactgatcagcccaccataggtttgattttgtgccagaccaaagaccggatactggccgaatatgccttgcgcggtattcaaaaaccaattggcgtttcggattatgagttaacccgtacattgccagaggacttaaaatccagcttgccaagcattgaggaattggaagcagaactcagccataatgatgaaaacacccctagcaaatgaaagggatttcccctcaatttggttactgtatccatcttccgtgtcattatgaagagtaaccaatgtactgctaaggaaatgttataaccgttggcctcatattggaggccatctctctcagcgacataaaagcataaaatcattcttactattattaaagaggtacttgagacgttttaccaaccaatccacatcatactgcttttatctcaaagatatttcttaaaagtactcatcatcacggtaatagcgacccctaataggatagctgcgggtaacaataataaattgggatacacagccgatggccaggagagatataacagacagggtacacaaaacgccggtttcacaaaccgtttggcatgatgataaacaaaactcgactcataagcggcaccataacgccgcaggtcacgtcggtttagtccttcaacgacagcaacgcctataaccatcacaaacaatggcaaagacaacaccagaatagtgagccggataataaaggttacggtcacatataccgttgccagcaagtacttccgcaaactttccgccagtaatacactccaatcgctcaactctctcaccatctcatagtggctccgagcttgtactgtatgctgttggttaatccagtccagtgcaccactgtctacaaacacccactgataactccattttaacccgatactgagcgtagtagcgggctctgataacagtaagctgcgggtaaattctttagacaaccaaccgctttccgtgatcatcacttgctggctgtgtctctctccctgttccggccagaaaaaggctatcccaaggtattcaatcaccaaactaaaaaacaacgataccagcaggaagccaataagcatccatggcatatcccacaggaccgtttttaacggacctgattttttcgctggcatctgctgcgatttagtgttctgttgcgtcatcgtcagcttccccatcaggcgtcagcaacgctggatttaacatcacattgaaatcaatctgactgtcacttggcattgatcccgcagaccaccaggattcactggtacggtaatgtttacgcatatcatcagcgattttttgcagacttatcggcatcaggtcatcatcatcggctgctggcaacggcatgcggatcttccataaccgccccccttcaagcctgtctttcctacacaaatattttaacccgcccccgcgttattgaacttttccctcatagattgatctcaataaaaaacacgacttgaggtaatctttatgttttcaaccagcgccgaacaatgggcaaatgacacgtttcaacatgcggaattaggtgataaacgccgtaccaaccgcctggtgaaagtggcctgttcgttggctaaccatataggacaatcgctcgtgcaatctcttgactctcctgccgatgttgaagcggcctaccgactgacccgaaattccgccattgcgcctcaggccatcgccgaagccggatttaccgccaccgtcgctcacgctcaacgttatcattgcctgttagcgctggaagacacgacaaccctgtcattttcccatgcgtcggtcgccgatgaactcggctataccacctcaaaggaaaaatcccggggcatgcaggcacactcggtgttgttatttgcgcctgaagaacaacaggtcgtggggttgatagagcaacagcgctggtgtcgagatgtcagtgattatggcaaaagccgacaacgcgatacacgcccttatgaagggaaagagagttataagtgggaacgggcctcacaagccgtcgacagccggttaggggagcagatggccaacgtgatttctgtctgtgaccgtgaagccgatatcatcgaatatctgcgttataaaacgagccaaaaacaacgtttcgtcatccgttcgatgcaaaaccggcgtatagaggaaagtcaggataaactttatgactttattagccggttacagagtgctggagaacgattagttcaggtcagacagaaaggcgggcgtcaggcgcgtgtcgcgcattgtgatatcagttatgccgaagtgacgttgaaaatccccgaaggaaaaagcggtgaggcggtgcggatattttatgtcggttgctacgaaaaaggtccggaggatgggctttgctggcatcttctgacctccgaacccgtcaacagtcaggaagacgcccataaaatattcagttattacgagcgccgctggctgatagaagaatttcacaaagcgtggaaaacgggcggcacgcaggtagaagcgctgcgtatgcaaagcaaagataatctggagcgcatgatagtgctgctggcctttattgcggtacgaatacaccagctgcgttttatgggtctgaacaaagaagaggcagagaaagagagctgtgagacagtattaagccccctggcgtggaaattactgtggtcaaaacaagaaaaacgccgtgtgccgaaaaaagccccgagtttgcattgggccttcatcaatctgggaaaactggccggctggtacgattccaaacgcacgggtcgagtcggatgggaacgactttgggaaggctggtttcggctgcaaaccctgatagacggctatttgctggctaaatcagttgatttggagatctgatcaagagacagccttcaagcagagcaaatgcctgacctttcggcaagttaatcacttcggcaggcgtaattaacggcgttctgatcgtgctaacccgatcctgagtattagaggtaaaatgaccgccctgctctggactggaaatatcggtaatcccggagaccaaagttttagtgtacacttccacctctggcaattgacgggttagcagctcggcggtgttattttccctgacccgcagcataaccagagtattaaaatttcctgttacctgcgccgctttagcactgctgccaatacgtgcttcaatatcagacaaagtctgggtgtaagcggttacctctatcccggcaccaccacccttgttaatcagcgggataaattcatcgcccatcagctcattgaattcatcacaatgtaagctaatggggagttttctcgttttaccttctggtaaaccgtcatccagaccaaatttgtaaatgtgacccgcaacagaaactaagtccgcgaacatggaattacccactgccgaagcgacttctgcatccgacaaagcatccagtcctacatagacaatacctttcttacgtatgacctgttgccagtcaaagatgggacgcggatcattcatatccgtgtaatctggagccaacagagcagctattttccccgtggtcagcttttccaataatggcaacagggacgccacaattttgtcaaaataggtgcgatcataacgaaccgcactgcgcaacccgtccagtatcggatcgtagagttttttccccgcttctgagcttagtgccatttcaatcgcccagattttcactgcattcgtctgcccctgcatattgcgtggcaaatcgtcttccgtcagcagacccagacttttctctacctgctcccataacacaggcaggcattgcctgataattttttcagcataagtttcatacagttcgccaatattggtgacataacgtaatatcagggtgtaatctggtcgctgccccagagccaccaaagcacgagtaacgatattgacaaaacgccaggcaaactcacgaaaagcggcactgttacccgccccactcaattgtcctgctatacgagaagcgacttctgaaacccgaccaaaacgcccaacagcattgtagcgagcactaatatccggccagcccagatgaaacacatggaactcatcttcccgcccgacacgatgcgcttccgcccacatgcgtttgagcaggtctgcatcccctttcggatcaaacacaatcgtgatattaccccgccggatatcctgcgtgatgagtaactctgccagccgggtcttaccaacacgggttgtaccgaggaccaacatgtgcccgacccgctcacgcaaatccattgacacattgacttcatctggttcaatgccatgcaatgctggattgcctcctactggcggcagtggcctcaccgggttccacggagaatcacgttgcgtcagacgacataaagagggcaatgggtactcaaaccgctgctcaaatgccctcgctaattgataataccgggaaggttgaacataacgttcgacttccgggcgcagggtatccagaaatcgttgtgtatgtttttgttgccaaagaaaccctttccccagaaacaatctctgatgactgacgggtacctggtggctggccatcacataacggggcaatcgccggatattgcgccggtagttcagtatatgtaacccctgccggaatcggagacctgataacatgccaaaacctgccgccatgacatcactgaccgatggtgacaatgccacagcccacggcgctacgatacagacaccggcggcaaccgccgaaacaacagcggtattcaactcaacagccggacgtaaccgtgcttcaatcacataacgatcgctcatctagcccgccataacaccacaattgccaacaacaatcccaacaaaagcaccgggaaactgtatggcaacatcagttcggatagtatagggtgacggggccacatcaacgcacctgctgagttaaaccgatatcggttatcaacactgggtaatgccgcaaattcaaccgccgggccaaatcactgccggaagcgggggctaatactaatccctctgcaagctgacgcagttcatccagttgtgctttatcccgcacactgaccagcaaccccaccgcctgctttttccgaaggccaaccaaattttccttcaaccactgttttgaccgggcatcatccccaatcatgaacaacgctcccattcctggcaattgcaacggacgagcgtcaacaggtccgggagacaattccggcgtttccaccggtaaaatgcccccttcggtcaaatctggcggggtcgcctccgtatttgaagaagtcgtcggttcattgtcctgagcgttaatggcatcaaaatacgctgctgtagattgtccacctaaatcagccacaatagtcagtgcagcctgagaacagggcgtcaatatcatcatcattaaaaataaacggcagcgataacggattaagttatggattaacatcttctttatttttccttcggttcaatccaggtctgtgtcgtattaactacagcaatattggtggacaaaacaggatatcgggtctctagcgtactcagtttacgtgcgacgattttccgatacttactcgcgggttgaccgccagcgggatggtgataacagcctgccgcattcaaccaactacccggattggattgataacaggttttcagaatacgagctgccacatgaagattagtataggggtccaaggcatcccaataagaacgaaaataatggccgttccagcctaaattcacttgagtaatccccacatcaatacgtttgaggggtacgctgcgcataaatccctgcaacgcctgccagaccgcctgtcgggttgcataacgataactttttccagccacattgagcgtccacggccaggggcgttcatgtttctcctgtggcaaacgttttgccgattcagccagtgccaacgcataaagcatttcaacgggtacgccatgcacccgcgcaatctgctggtacccaggcggaacaacctgttttaccgccgcggccataccttctgtcacccaaaagagacttcccgccacagcgagactcaaaatgccaccacacgccatccgtcattctcatgttgtagtacgaccggcattttcccctgaccaaattgtcgccagcgccctttgtcatgattaagcgtgatttttcggctacggactttttctgagggaatatgatgtttacctgcccaggtacgtaaaacatcatcgttgccttcgctatctaccaggtaaatatccacctcacggtcagctgacaagacagcagccagccgggcatcacaagccgcgcaatcctctttcacaaataacaccagccgcccttgattaccctgtgcgattccgtcccccttccctaaattaaccggcaaaatattcggcgccagacgcttccaggccgcatccaccgcccgctggaacgccagttccttttcagtacgaacatattcctgcctaacccacagttcggcataacgttgacgcgcttgtactgtttcggcctcaatacccaatgcactcaacggatcgagcccaggagactgaatgccccgttgcccctgcatcaattgctgataacgctgaaactctgcttctgtcagtccccacatttgcgcctgaatacggtggttttcagcctgcgtgacctgttgctgagtcgctttcattcccgtctctgtctgttcagagatagcaacctgtgccgccgaagctgacagagacataacaacgccaatcagcaccactcccttcctctggctgaaaaaatcttttctcatcattaccctccattgactgacagggtttgacggtgcccttgtgcctggaacacagcctgatgatcggagatactgaccaacgtccactcaaatgcgctttcacccggagtcagtaaacgcatctgagatatttgggaacgaggatctgtgtctcgtggaataataacggcataaacttgttctccccgacgttcaataccagaaagtatgaaaggagccactatccgtttcttcgttcgaagaacttcccgatcaggtgtgcccgcttttttacccgcatgcttttcctgctgagatttccacgcgattaatgcgtcaacgcgtatttcctgctgtttcccgatatttttcaatacacttactgcttcggtaagatcctgatgagcacggcttaaatcagtaactgactgtgcgagctgtttttgttggtcgttaatggctccctgttgcgctatcaatgcctgatgaaaccggtcattttgcatttgccagtcctgacgggagacaaagccggtatctgccttatcaagccgttcgtgcaacttttgcacctcatcaggcaaatgctggaatgatccatttcgcatcaatgactgaaattccactaactgatgatgttgctgccgtaccacgaatgccagcaacactatgctgacaataacaagcaatattgacagatacctcagacatttttttaacgacaacaatctgggttgggtcttttgagaaaccgcctgccgcaagctgtcaatttcagcttcagacgtcagcgacggcgacagagaaggtatttcagttgtcataccacagtatccttgtttatttcatttggcactgtgtctggcgtacttttcagtattatcgggttgcctcaaaaaacaatggacacaggaatgcaacttattcagtagtgattagagtctaatcatatgattacccgacacagggaagcatactgtgcaaaaccagagaggatgacgataaaaaattcaacatgaaaaaatgaaaattacactccaatatagagcataaaatctgtggggtactacattggcgtttatgccgctatagctaatgtaaaaccatcaaccatattccgactagctcattaattttgatgctgggataccaacgttcaaattgtgcctttagctcgccattcagaactgccgtccgagaggagcatttaaatgattgccccacggttttttacgctctcaactgtttcagttaaattattgcctgcgtcatttatgatattaccgttggagtgattttccatatctccggttgtcgagtgatggctatcaccttcaacatgcaaaattgagttaccccaagcatcaaattcaaatgcagtgcctgtaggcatatgagtaacccgataaccccattattcgtaccgaaagatgctacattgacagattcgtagctttaaagatacaataatttatatgaacacgatcaaacattatctcacctccgataaccgggacttgtatatggagttcctgaaaggtattcgtgaccctatagcgaaatcgaaaatctcgtcacgggttaaccgaatggctaccggaaattttggtgataataaaccttgtcgagagggtgtctgggagcttcgcatagatcaggggcctggctacagagtgtattacagcttagttggtcgtgaagtggtgttattgttagttgggggcgataaacgaacccaagatgccgatatagatcaggcgattgaatgtctgaaggactatttgaagaggtaattatggccaaagcacgtttacatgatgatgcaatggtgcagcttctccgtgaagatcctgagtttgctcagcattatctgcatcaggcatttgttgatatggatgaagaaggcgggcaggaagcatttcttatggcattacgccatgttgtagaagcacgaggaggaatggcacagattgcagataaggcaggtgtttcacgcgagactctgtaccgaacgctgtcgcctaaaggcaatccgactttgaaaactttgcgtaacgtcgttgcagcaacaggatttcaattctctcatatcgcattaatagcttaattctgccagataattataaccgtcaagcctgtgattaacgacggttttcaacccacatcagccttatttttacatttgccagtcctgacgggagacaaagccggtatccgctttatcaagccgttcgtgcagattttgcacctcatccggcaaatgctggaatgatccatttcgcatcaatgactgaaattccactaacttgatgatgttgctgccgtaccacgaatgccagcaacgctatgctgacaataacaagcaatattgacagatacctcagacatttttttaacgacaacaatctgggttgggtcttttgagaaaccgcctgccgcaagctgtcaatttcagcctcagacgtcggcgacagaggaggtacttcaattgtcataccacaacatccttgtttatttagcactgtgcctggcatacttttagtattatcgaattacttgacaaaacaacggacacagaaatgcgacttattcagtagtgattagagtctaatcatatgattacccgatacagaggagaatactgtacaaaaccagaaaggatgacgataaaaaactcaatatgaaaaaataaaaattatcccctaatataagatgttatttttcctgcttcaccaccaccataacaccacgggcagccgttgaaacataacgccattcatacagtaagttttgtaatgtaattcctgctcgttcccagcgagggattaccacgttaaccattcggtaacgccatgttgggtaatgcgccagaaccgagcaggccagctgtatctgagcaggacgcatcaaatgagaacgaaagtaatgttccggtgaactcaccttgcgtggtcagataaccacaaaatgggatgttaacggaagggattctcaggccagggcaacagctcattcaaccgattgttcggccagacaggcagccggctgaggacatcacgtaaccagacccagggctcatgtccgttggctttggccgtttccagcaggctcattatcatggccgcccgttgccccgcggccagtgaacccgcaaaaagccagttctttcggccgagcgccacaccccggaccgcattctccgcccggttgttgtctatcggcacccccccgtcatccagataacacaccagcgccgaccagcgcttcagcgtgtaatctatcgctttgcgtaaccccgagttgggggccgtttgggtctgcatcgtttgcaaccaggaccggaactcattcagccacggccgggcataacgctgccgccactgacgccgtttatccggcggccggtgtttgatttttcgctccagcttgtacaggtcacgaatgccatccagcgcctgtttcgccaccggactttggctcgctttgtattggtcaaagaatttgcggcgggcgtgagcccagcaacccgcttcggtgatatccgcccgggcatgcagtgcgttgtaaccggcatagtcatccgtcaccaacgtgccgcccgaccagtctttcagcaggctctgggcataacggccgctgcggccgggatgcagctcatagtataccactgccggcgaggtatcggggccggtgacagacgtccacaggtaagctcgctgggtctggccttttcccggggccagtatcggcaacggggtctcatcggcatgcagcaccggggacgtcagcagcgtctgcttcagggcatcggctaacggttgcaacgccaccgccacctgccccacccagtccgacagggtgctgcgggccagggtgacaccgctgcgggcatagatttgctgctgacggtagagcggcaggtggtcacgatatttagcgaccaccacctgagccagcaaccccggctctggaaggcccttttcaataagatgggcgggctgggctttagcatgcacacactgacagcgcgcgcagctgtactgcgggctgatatagcgccggacgataaacgtggccggacggtattccagtcgctcactgatttcatcacgcaaaaagcgcagggcatgaccgcaatccgggcagctctccgtctccggcgccagccggatatcttcacggggtaaagtcgccggcaaaggctgacgtttaggctgggccggggtcgcgttttccttgatatgcaggcgtgacagccgggtttccagcaccgcgatatcggtatcggcatcttcctcaaactgactgcgtttgggaccggcaggcagggtttcgctgtgcgcgccaaaacgccagcgttgcgcctgtttcagggcctcttccagctggcgaatataatcaccttgttgctgaagcagcgccagtgcccgcaggcggaactggccggggtcatccagcgcgattaagtcattgagcgtcatgccgacagtgtaccggataattccccgtcgttatccggtaaaagtgtgaccggggtagcggaattagtttcgccagccggacaggtcatctccctcgacctgttgccagtgaatgccgcggatgagccagtcaaactgggcgggcgtcatcacccagctgcgctcgccctgcttcggccagacaaaatgggcccggtgcagacggcgggtacacagccagacgccgtgtcggtcccagcgcaacaccttgagacgggagcgggccttgttgcagaaaataaaagcggcttcgtcctgccagcgcaaattcagcccctccaggtgctgggtcagggcatcaatgccccggcgcatgtcgacgggctctcgcaccagaaagagctgttgcggtttcagcatcgggtcagtacccgcatcacgtcaggcaacagcgtcaatggacaggcgatggcatagccgtctggggtatgcagggtgacggtgcgcgcgtcgtcaggctggagtgaaaccggtaagagggcgggcagtgtctggctgagaggttgggggatgttgttactgtcggcaatccagtcgcggaaagcggaaaaactcagctgatgctgttcgcaatactgttttcgggtcaggtcactgtggcgccattgggtcacatggtgttgtttttgttccggggtatatcggctacggctcatggtgtcagtctccaggtgaagataaggaagcggtagcgtgcatgggccggagaggaagaacaaggtgagatgaccggacgtttacgaacgaaacagaatatccctgtctgcccgcaaaagtgccccctcaagttcgcgaacaaatgccgcatgaaaacaccgggttcggctccgtgtcagacgccctactctgtcagtcggggacaaatgaatgacgtaataccgttttttcctgtgtcgaaaacccgaacagataaatccccgccagggcgttaatccgctcactagtgcaaagcaaggacaacacaaaacccctaaaataaaaatcaaatatattaacacgttacgttttaaagctatttacaacaggtgatgacataggctgattcgctgcgttggtgacccacaaatttaagtcccgccgcataatatccaggcttacatcggtgttcagcgaaatcacgtccgccccagtttccatcccgataacattgattctgctgcaaggtggcctctccttttgtccacagaccagactggcaggacaatatggcgcctttgctgtcgcggctaaccaatccattgggtaaacaggccgtacccgccactgctactttatcaagttgtaaaaactctcctatcgacaaacgcccatcagcccggagggtaccgcttttgatttgcccctcagtataaacgcttttattattgacactgcgaagccagttgctgtccgacatcacccaaccaccaccataggtttcatttaaccagcctttattctttgtcgtcacaacccagccatcgtggctacgaatatccccctgaaactggccggcattcgcccggatatcgccactgaaatgaccagcctgtgcattcacggtagccgtattgttcaggttgttgcctcccatgttaatgtcagtatgcattttgttcagctccggacgaccggggacagcaaaacggtacaatcgatctctctcctcacgagcagtagataactcatctgcgctcaataacacggccaggtgaccttcaccactgtttatcccaaaatcctttaaaggcactgtccatgtgctcattgcgccggtagcggtcttgccatcccgaatatatcctcccaatccggtagagatatccatcgatatcaggcgcagggctttataaggtaatggactcccttcttgtgtcaccaccattgcctgcaatagtgccggatcctgggtattgcgcactacagcggtctgatagcgctgtcctgaactgttggtgtctttgaatccggatggcaacagtccggtttttctcaacatatccggggtgatcatcaccggttgggttgtcgttgctgaattccgcaacctatcataataacggccaatataagctttcgatgctgcactgaaacgactgctttgcgccgccatgacctgccaggacttctctgtcagataatcgttgtaaatgcgggttcccaacgccgacagtaccagcaatatcatgagtccggcagcggtgcccagcatcatatatcccctatccggccctggccccctgctgctgccacaacacccctttctttctgtcactattagattacccatattggctgatataatcgttccaacaacatgaccacactccccaaactaagccaaggccccagtggcccgcctttcgtaccttgatgaggtaattgtgccaaatgccacaacacgaaaccggacagacccatcaagcaacctatcagtgccggtaagcctgtcagccaggcactcagtgctcccatcagccagacatcccccatccccagcacttcacattgagagtgccggttcatcagctcgcgtaacactcccatcccagcaagcataagcaccgtagccaaaagagttattgatactgacggcaacgaaatattgaccaagacaccggacaccaggcaagccaatgtaaactgacgaggaagccagccactcaaaacatccataaccgataattgcagcaaaaaactcagcagcaacagtgcggctatccgttccatcagcggcgctggtgataacaacatcaatgtgcccgacatcacgtacaaacagatagctattcttggtaccggatgcactgaacacatcaacagaccgtattcctgcaaaaatttactcaccggactaagcagcacgcatccgatgacaaataacgtcatcataaccagaggggtatattctgtaggaaagctaaccgcaatcagtgtcttcatttaaccattaatcgtaaagatcagtttattggtcccggtacgaccgttgttccttgtgcatgctgtactggcgctttccagtgtcaccttgccatcagcgtgatgagtattattaatagtaatctctgatgcacttcctccccggctcatcccagtcgctaatgaaacacaggcagactgcgggactctctcgtaagttaccgtgaacccattattaaatccccctgtgctgctcggtccgaccttaacctgaccaccccaagtgttccacagcgtggcattaccgacagtcgtatcgccgcgaaccgtcatactcttcggtacgccacccaactgaatcaggacgccggtcatcttgtctgcgtgactaaattcatatccaccactgcctttcattaacccctgagtactggagatgatagtttgcagattcgttgtttctacaaccgcatccttgcggtcatacaacatataaatgccccccaaaactacagtaatcacggcaatcacaaccagagccaccgcaccattttccaaaatagcccaaccccgttcagggggacgggccattcggtcttgtttctgtatcatcatgtactgcattgatttattccttatataaagggttctttacggagaaagtcgttaaaaggaggtttaatttaaggggattacggcaggatattagccatgctctgtatttccatgacggccaacaggatcaacataaatgccccgacaaccagcaacagtgaacacaacatgaccaaattagctcgcctgttcacccgaacgatggtttgatccagccaccgctcaccatagcgtccaatcatctcagaagtaccatcaccttccgtcagtaatgacagaaaattcaccgcttcctttgacggaaagtcatagccacagtgatgcaatgcccggccaaagtgatccccttcgcggacacaatcagcaatagactccagacgaatctgtaaccagggagatgcaaagcgttgcaggataattaacgcatccagcgtctgaacctgggcacgcaaaagggaagccatgttcagtaaaaaaatggcgccctgaatatcgctatagaccgaccaggggataaaatgatccgctatgcggcgcagacggttgacccaccgcggtagcgaatacgccacgcccacaataaaagagatcagtaagacaccacaccacagaaaagcatgctcaaagaacgtcgccattccgttcagccatgccagcaccccctgccagttttccggatctgcaatatttcttagcgttggtaccaattctgttgcggtgatcaccagtaatcccgccatcagtagcaccaacagcaagggataaatcatcattctgagcgacaccatcagaatacgctgacggcaacctatcagtgtcatggcctgactcagcgcttcaggcaaatgaccgctgcgcatacccgcactaattaacgccgcctcttctaccggtccccaaacagccagcacatgttccaaggtattcgtttgactgttatcagtgagcgccgagatgcaatcgtcaatgagttcagcaaacggatgccaatgggtatcgaaatgcgtatacacatcacgtatctgccgcaacgctttcaataacggtatcttgttttcaagtaaaaaacgcaacgcctcataaaaaatgatgcgataactgggtaagaaagtgtggcgaactaacacatagcgcagacgcctgccccatgacatttcacgcatcacacggctccatcagcaaataatcatcttcatccagcggacaaactaagtcggcttccaatggatcaatcagcccggcattcagcttatgcagtagatgctggcgacgcgtaatcccgcctaagttcgatacccagtgttgtctcgcggcctctttgccctcagtcatcaacaaggtaaaaaatcgcgcatcgggcctaatgacttctgccaccacgctacgaccggtcactccccggctaacaatccgtccgctcagggtaatcgtctggcaacaatgttcacatccttcagggtggcgaaaatataaattctctacgcaacaggtaccgggagcatggcaataacgcatcagataagcccgttgttcctcatccagtaccgcctgtttctgtgcccaaggtacccgacagtgtgggcataatgtctgcaccaaacgctgactaatcaacgcaatcaaaagctgtgcgtcggcgatcagccccgcattcacccccatggttatcatgcgttcaggaataccgactgcgctattggtatgcagcgtcgtcatgacactatgtcccgtttgcgcagcataaattgccgttagcatggaagtcaggtctcgcatttcgcctggcataacggcatcaggatcaagacgcagcgcagaggtgagcgcccggtgccaggcaagcctgaccgcctcttcatcacttttgtcacacacgatgggcgtttgaatcgcaccggcaatcctcccctccggagggtcttcaacggtcaataaccgctttttaccgccagtccggtcaagatactggcgacaaaaagtgcgtaatgtcgtggacttcccagaaccggttggccccgataacacaatcaagccctccggcaatcgcaagatacgggaaacccgtttaatttgctgtggcaaaaaacctaattgtgtcagtgtaggcactttgtcaccatcatcagcaatcacgcgcatcacaacatacaacccatctgcggttggtgtatggctgtaccgggcgccatacaaatgtacccgacgcagaaaatccgctttaatcctcccgtcctgctgacggcctggaaaaaattgcgtttcagtgacatcacacattgacaggatgatcgtggatgccagtgccattccctcctcttccgacagttcattgacgacttccagttcaccgtgaatacgcatttcaattcgggtcagtcctggactgatggtcaggtgaatatctgacgcattcagtttttttgccagttcaaaacaggtcagtacctgcttctggcgttcactcacatcagttaggtccgacagacacacgccctgttcattcgtccgctgattctgtttctggcggttcgcctgcaattctgacaaattgacaaagcgaatttctgcttctggcgtggcttcaagtaattgcatgacccgggtctggacctggggatcgccccgacgattgttgtcaattaataccgtagcctgttgttcttcacataacagcaacacggcatcattaacctggatgttttctttcattccctgtcttctctcagaacgtgagtaccgaaccatcacttagtgtgaccgcagaaagcgtgatcaccttaactttgaactgagtgccaggcactgcgtcaccgacagctaactccatcacaccgcggcccggcaggcttacgctcgcccgcaatgcatgcccccgaccataaatctcctgaaccaccggacgggtcacaggttgtcccgctgtcatcacaggcgatacggtcaccggcagatcgatattattattgcccgtcaaccccaaaggctgactttctgtcagttggcgttgtaatttagcccgctgcaattctgcttccagcagcagatttttcgcgtgtaaatgctctaactgtcccacagtcacacccgcagatgcctctgtcatccctgttaccgaaagagcgctatcttctgttgcccatacgggtgaactgataaaaattagcccacttaacacactgatccacaaggcagtattatttccgggcataaatgtatccctcagtctgataggttaactgtccctgtgaggtcagggtaaacgtgaggctgttcattcgcagccctgtatcatccagttcagcaaatagccatgctggcatcacccgactactgaagctgaacaggtattctcgccaatcctgggaaggtatagattgcccgtcgcccggtaatgccgatgcgggagtaagttcatttaacgtcagagggatctgccattgctggaaattcgaaaccatcttcatcaactgtactgaaacagcaggcaccgtttcattgcgaaccggcaaaggtttccacggcaggaatacccggccttcttttgcgccctgaaccaggtcaaaaaccggtgactgcttaaatacactctgtacacgctgaacaaaatgcgctgctgtaccgccaggcataatctcgtagtgaaggcggacgccatcttttcggcatgaacctgccgtcaagcgccaacccgccaataacaccgggatcgtccgactggtcatgacacaacgtgccaaaaacgcgggtaacaacggcttatcggcccacggatgaggtaagtcaaccggttttggcgtttcttcaaacaatcgtgctgccctgacttgaacggtttcagtcatcggtaatctctcatcgggagattttcctgactgcaataacacccatacgacaatcaacaaagagatgaatacagccatcaacaataatggtgaccgccaccgccgttgcaggcgacacatccgatactgatgagccgacaaagcagaaattattgagcgccaatgcgccggattatcagggtcagataccacccgccagcttttatctggagccgggttaaacgttaaaaaacgggacagtgctgcattgacattctcgcgggttccgacaatatcggccatcacggacggcaaacccttctgcgttgccaaaaataaccattgcccttcgcccaaatcatagatcccgtacccgtttgggccggaatgcgataaaaaagcgatggctaaagaatacggtgtgtgacggcaatacaatttcctgattattcccgtccccatcatacgagcagtctgctgacgtctccccgaacgattgcccacgaccagatgtacatcgatgtattgagatcgactggctaccggacgaacacgttgccttctgcggggtccccgttttactttcacgtacggtgaccaacgcaggccaccgatccaacaatggcgatcggcctttacaaccgtgacttcgggtatctcaccggatatttctaaatcgatgcttttcattgattcatgcagcctttcattcctcaatccagtaatacgggggtgatcaaaataaccaacgtgctgcgctgattctctccggactgtcctcccccaagcaggaaattacctggtgtaaaggttcccgtcttagtcacccgagtatcagcctgttcaaatccggtgagtaccagcgcctgcccggcacgtagattcactttctgactcagtgaacgtaaccgggtatacggcatctcgatataagaattgccttctttagatgtgaatgaacggatagtcggcggatcagacaggttaaaagccacttgtaactgaacatccccattacgctgtatcaacggcaacaaagtcatattaaacccggtagtgatcatcccgggcgtcagagctgtggtggctcccacatccgtagccgtcgttgtactgctttgagccacgtacaccgtctgatcagccatctgtatcggaatgggggtcaaattagtggtcgcacttccttgagaggtcaccacactgacattaccttgctcgctcaacgcctttatcagcaggctggaaccggagagttttgccgctttccctgtggcactttccaaaatactgacacccgcagacgttgtcccactgcccataccgctaaaactgccagacagcgtagcccccaaattatgcaatgagttataaactaatccccagtccagtcccatttgctctttacggctagtgctgacactcagcacctgaacattcaacaaaacctgacggttgagaacagtattttgttcttccacataacgggataccgaatccagtaccgccggcgtgtctgttaccatcagcgttccactggagcttgacaaccagaaccgaccacgctcgggcgtcaacatattctcgactgtcttacggatgtcttcgtataaatcactgttcagatcaaccgtggttttctgtgaagagctggcctccccagagacagaattgttgacattaccactgccccctgatgtccccatactactggttgaccctgaggcaacactggcattactactggtacgggtgttgagaacattcaactgaaatgtccgggtttcaaaccgataaaacacgactgccctgttatccctcttccatgcaatccctaaccggctggcaatattgtctaaaagccccgtcagctccccttgccaattgagacccgtgaggacttctggctctcgacgctcatcagcgttaattgagtgtatatctcgatcatccagccaatccaatggcatacgtcctttatcatcagctgtcggtaatgccctattcatctggcgcgtcaacccacccgccgtggttgatactcgtgataaaacatcgggcgctaccgtgacccgaataccacaaagttgggtaatgcgttgtcctagttccggtaatgtcagcccgactttactgttaataatcgttatctgacaggatggtaactttaccgacgcgacaggctgaactaccggtttcagattcacccagggtttatctacccaggttacccccggttgtttcaggctatgctgttgatgcaaatgctgttgtgctacccgactttgcacactggcctcacgcgccatattatccactgccggcaaggtacaaccggacatcagcgccatgcctgttaccgccgccagtggagcaaggcaagtacaaagcctgagtgaacaccatttatttttcatcacatcctgtccgttttttcagttgaaatacaccacatcaccatcgctaatcccgtcaggaagagtgaatcctattgcctggccggataagccatacaaccgtccctgtcggacttcaccaatcaacatggaccccttagtgcgttcgcgcagagcggtgacaagaccgggtatttccggcatccacacccagagccggccttgactgataacatgccggatacgggcatcaggctgaaaaggcagaatgagcttacggagatccaccgtgccatttttagatgcatagccgccacgccagtgattaatggcactggctaacagcaacatttgatctgccagtattcgagcccttgcgttgtcacgatcgatatgcagttgttctgcctgtcgcagctgtataccccctgcaatcaacagaaaaaccaaggcaaacgcactaatgacgtaccccatgacggcttaccgggtcaccggtttatcactgactgaaatcaggcactgaaggcggctgacttcggcaaacaatggcttctcagcctgtcgataaagatcaaacacttgtaccaacaaggactcaaagttgcctttgaacatcaacggcgcatcaatgcggtaatccgtcggtgacgaccacaccactacccagtgtccccctaccgggcaatccgttgtattagcccaccgctccaacgttccacgcaaagtggttcctgtttccgcacgccagatgttgcctatcggtaccgttgccactggtgtactgccgctcagcagggatttaatgggctgagtaggtgatactgaagaaatggttgtggatttccctcctgtcacagaagattgaagggtatctgttttcggtctttcagctatcaggggcttcaccggtaacggcgtggctaatgtgctattggacaatgtagatgccgataacgccggtgaagaagctatttgcaacggtacccgcattttgggctgtgttatccggccaaccgttgtctcggaaaactgacgatattcatcacgtaaaacaaaacacacttcacgattcacctcatctacccggatacgccatgctggcccgacaacaatctgtaacgcttcactgagccgtatcggccccattttgcgttgaatagccggtaatggtctgcctatcaatttaacgaaatgggttgcggtggtatcacacagcgaataacctgttccaaaaagcagatagtgcaatccatcaccaatgcgttgtaccaatggtactggcatggtgatattgatgatttgattgaggggttcacgctgcacagcctggctgcctacactcaccaaggtatagcgatcatagcgtgtaacttctggtgtcagagaatagatatcggatacagcgggacttgcctgatgagaacggtgaaaacttacaccggatgcggtagcctcctgagtttgtccggcacacccagctaataccatgacgagcacccaactgagtgagaaaaaaacagggtttttcatgcgcattcccatgcaggtgatcctaaatgcggcttactgtgcggggatccgggactgtgctcaatgcagaactctttttacaaaatcaaaaaaaacgcaccaatcgaagtcagtgcgtcagatgagtcaattcgtcagagtgaaaagttaatgccagaacagatctgcctgccagttatgagcaaacccagagctacgcagataaggctgaatcgccggatatcgctgtatcagatcatcaatcgtgtcaaaaaagttcaggctggtaataccgagtgtttttatcatctgattcatgactaccagaacattataaaggcgattcgtctgtagcggcgcaacggtaagaagatgcatacgtcccgttgaaatatttagctttataaattactgtgcgcggcaagtgtgtgatcgagacggctgcgtaatttaacttccagtccgacgatgaccttaaaaaggtaagctcggagctcttcatcaaaccggtaaatctgaacgccatgctcaaagaacgctgtcggacggtaatgcttgccaccggggctagccggatcgaggaacagatgcaggtaaattttgaagtggtgatagcttatctggctaagaatttgttctgcatcggcagtattctgaaactgaagatacttagcctgtaaatcggcaacaagatccccccagtgagcgatacggctttggatagaaggcataaggcatgattagcagtcatccctgaaggggaaaaaagaggccaaaaaaaagcccactaacatcccctaagggaacattgcgagcgttgttaaagctaatactacgcctgacgtagattttgtcaacgcattttgacacttttgtcagattcgcatagggttattctcggtatctgtgagtaaccaggcttttgaattgccctagaatattaaactgcaacatagtgtggtgaagataaaggcaaccaatcccacgctattgaattggcaaaaaccattgccacgcaatggaaggagtaaccgatgaaaagccaagaagtaaaattcagccactacgatactgccgattatctccaaacagaagaagatactgcggcgtatctggaagctgtgatagaagatggtgatccttcccttattgcagctgctttgagtgacatagtacgagcccgtaacatcagccaactagcaagaaatgttggaatgaactgagaagggctttacaaggccctttctggcaagggaaaccctacattcacaataatcacaaaggttgctaacgccttggggctacattttattatgcaacccattagaacaccggcaacgcacactcaataggatcaaaccttgtttttctccaacatattggactaattttcgatcgaagtagaataggtggaaaagacggacataaagcctgtttctatctacacaaattccctgttgcaaaatagggaatctttttgaacttatcgtaataacaacaatcaatcccttaagacaagaacatagagtaagcctctggtttgaagtcacctccccagcggtttctcatcaaaccgtgcttccgattactctacacacagccttgctgtgtggttaagatttacggtttattcaggttcactttcgttacagtttgcccgccctgacaatctgtggtaggagggaacttgttcggcattatttccatgcttcaatcaccatctacacatatgacatagctacatcgttaaactaaccaactacggcgacaggactattacctgcaagatatcaaacagtttttcagtccattcagaacggctatgaatactaatggatatctaaaatcaaaaagtactaatattttcattaggttaatgaaagatcttgaaacgtaaattattttgtcaatttaaagtgaattttctaaacaaaacttacaagttctggttgatgggttgatggtcagtaaccaacaatagtgaataaactgccccccaacatcatgataatagatgacaccattccctgaaaattatttcagtgcgagtaaattggccccttccccaaatttaataccaagctcaatcagagagcttcgtctttctggtaaagttggataaattccaccggtgtaatgattttttaatggtcattttttcctgccgaaacagtaatatcaaaaccatttcagctcttggttgttgcaagagcgctatagtaaccacaataaaccactttagctgactgacaacgctacaacccctatcagctattacaacaacaatgtccttaggacattgttgttgtaatagtaacatgttgtcaagctgtttttttgtttccctttaattcatgcagttacagtctcatttcgaagtcttaaaacttgacattaaacatctgtcaatgtataagtccttaggacttatacattgacaggtatcatattaaatatgaagaaaacaacttcactgcgagatgcactaaggctcataattcttaactatcatcctaaaccgataattgctcttcatgaactcaatatgtatatctacatgctctaccgtgacaggatgtttgatggtatccgcattggcaaaatccaggcaactgaaccggacaaacgaatcatggatgatgctctggaagacatggttaatcagggaattctgtcacccattattcctagttttatctggcaaatcagtaacaaaaaccaagcgagtgctcagcagattgcctgctgtctcacaccttactcccatcttgcctatctgtccgcaatggaatggcatggcatcaccgatcgtattccacatattgtgcacctgatccaagcacctcttaatactgcccggagcctttatcaggaacatttactgaaggatttccccgctataagcaacatgcaacctctgatgatccgcgggttcactccatacgaaaaaatcgatggcaaggagctgattttccatacccatagaaactacagaaaaaagcaggaactccatgactccggtgggattcgggtaagtaacataggtgaaacctttctggatatgctcagggagccggatctgtgtggcggtttctcgcatgtacaggatgtgttccgtgaatatgctggtgaatacctgcctgtaatcgtcaaaacagttgataaaaatggaaaaggtatagataaagccagggtaggttaccttctggaagaagtctgtggactaacccaccgcacgattgaaacatggaagaagactgttcagcgtggaggaagccgtaaattaatagcatcaaacccttacaaaaagacatactccgaagtatggtgtatatccatcaacaactgataaatactctatatggaatactctatagaagactggatcgccgatgcgccacaggaccgcatcaccttccgccaggccgtacatatagttctacaggccattgcctccaatgaatacctgaaaccaaaaatgataatgaaaggcgggatcctgcttggcctgagatatcagagttcaagatttactgaagatattgatttctcaacgaatatgcgacttgccgatatagatcagcagactttccatgaagagctcgacgatgccctagccatttcttccgcagaattgccttatcaagtgacctgtgccgttcaaagtctttccattcagccaaggaataccgaagaggcaacctttccgtccttcagactgaaaataggatatgccaggaacaacaatgacggtgaaatgagacgtctgcgacagggacaatctccccataccgtcaagattgattacagtctgaatgaacacagcctgaatgttgatcacatcaccctaacagatgacaacgatatccaagcttacagcttcacggatcttgtggccgagaaaattcgttcagtgatccagcagattgtccgtaaccgttcacgtcgtcaggacatctacgacctcaatctgcttttagacagcatccaacctgaaaacaaggacaaattggctatactgaccacactactggaaaaatccaccggtcgcttggaagacggaatggtcaaccccgaaaccctgggcagagtggatatacgtgaacgatcctcacgggaatatgaactcctgaaagacgaggtcgaaggggaacttatggactttgataccgcctatacacgtattgtggatttctataaatccctgccttgggacttagtaacaggttggcagaatgttgcaaaatagcctgtatctgtgtcatcaggggcaacgagacgagcagctggatagatttttctttatcaacactggtgtatgttcggtctccgtgatggcagatggattcagccactgccatgccagtccgcattatgttgactggctgggtgaacaactttatgcactggaaaataccggaagttgctgcaacgagctgtgcggagaagtcctccggatcctgagctgtaatgactgttatccgggaaaggctagtattgcggttatcgtgtctgatcaagaaaaataccgctatgccactctgggtgatacacggatttactggccctcacacagcttcagaaccaccgaccattcactggcccagcgctgtattgaccgaggaaactgcccagcagaaaaacttcgtgaccacccgctgcgtaaccagctcactcagtttgccggtgctgacagcaaacatacactcacctggtcagaacgggaacgcacatatcatgatgccatcattatgtgtactgatggcttctggtcccatttcgatgataggtttatccacgaaatacagaccgaagcctctctccacaacgcgttcagtgggatgataaacaaaaagacagtacctgaagataatgtctccgtagtcctgctccgagatctgtgacacccgtatcggttgtgataaggaccgaccaaggggcctgattttaccttgccgtacacccgaacaatgggcttatcataacagtgctgaactgagaatcactcagctgggtaagctcacacaaaacaaatttattgagagttttaatagccattttcgtgacaaatgtcttaattcaatgatattgaaagatctctgactcctctatcctgcatctctcagaatttcagcggttaccttatatcgttgattacgcgataggttagaccatgacaggtagaggtctcgttcgttccattcagtgctatatatgcatcccatcctcaataccccggatccctgccatgacttcatttggttgttaatccgtcatgattcgctgatcttcgcccccgttctacagactcgacggaaccaccctacaccacactttcccagtatcactgtgtggctgaaatttacgaagctcgttcaggttcacttgctgcatacttgcgtgctcccactgtctaggtctagggacacatttatccaacgttgctcccgtgcttcagtcaccctcccatacgtacgccatagccacacaatcaaacataccaattactgcggcaagactttcgcctgcaagatacttttactttttacacaactataaaaaacaaaaaagccccgtataatcggggcattacagaaaaaaacttaccttttaactcttaggtgaactctaaaaagggatcaactcgtcaaaatcgattggtggttcacttcctcggggcggcactgacgaagaggattgcgattgttcccgaccacttgaacgggaaggctcactttgactacgcccccctaacatctgcatcgtaccctgctgattgagcacgacctccgtgctataccgatcttgcccactcgccttgtcaaaccatttacgggtacgcaactgaccttcaatatatacctggctgccttttttcaaatattcaccagcaatttcggccagtttgccgaaaatgaccacccgatgccattcggtacgctctttctgctcacccgtttgtctgtcccgccaggtttccgatgttgccagtgacaataccgccactgtatcaccctctggccgataacgcacctctggttcttgtcccaatcgtccaataagtatcactttattcacgccgcgtgaagccatgtaacttccctttcaaaatgtagatgaaaaaaattccccgaaaaaatgcactccggagagacttcaggggcagtcaaaatgaattctctgcataatgcttttgcgaagacttattctgtacaggcggcacggattcaggtttttcagctttataaaccatctcctgcccgattttgatccagtcaattttaatcaaccgcgctcttaaactgacacgctgttcaccggcatgctcacccttgttcaacgtaaaaatcccggtagacggctgacttaatgtgaaacccagtaagacttttttgtcctcatcaaccgctttctgacagcggctgattaagtcactgttttccttaccggcaacagtgacatcaaagcgaacataagacggattctctgttggtccactcaatgcattgatgaccgcgctgaaaaaactgccattcggaccattcaccttgcggacattgctgagataccccaatccattgatattcaggttgaaatatttattttcagtggtaattgcagacatgatgttctctctatgaagtgaaaaaaagaaacgacggagaacacatcacccagggcgggaagtgatgtttcccgccgggaagccagtgtcaaacacaggctatctgataagttaaaaatacaccttcatcactgttatcagtgatacccgtttccaaaggataaacgggtttaccgcccgcaggcaccacctctcaggctacaatggctttgtgacaggtcacacgaaagcgtcagtctcagacctttctgacattgagagcagtcacccaaaggcattcctctcagactgcgggaatattggcgattgtccgaagacaacaagttatcccacgcatttttgaatcagggggccagactgtcaacgaggaaaatgatttttgggaagcggtaaaaaatagcgccgcccaaaggacggcaaggaatctgcactggcatatggtacaaggttggaagctaagtagtctcaacaaactccagggacattcaactatcccggcgcggctatttaccaacccttcaaaggaagccgtttaccggactgacaacagagaaaatctatgcacgacttgcctgtcaaaccgcagtcgtggggtgcaatgtaccaaagccagtttaccttcccagatctccagcttaggtacacaacaaaaaatcagctcaccctgtcattgccggttttttcggtatgttcttatgccgggcagatctggtttttctttttccatcgacggtgctgactaccccactgcattccgggtattttatacatccccagaaaacaccgttttttccctggcgttgacgcgttacgcctccacacaccggacaaggcaatgaaggcggcggcgtgatcacgactttctgcgcctgaacctgctccaccaagtattgggtccattggacctgacgagccataaaatccggcaattccgcttgcccctgagcaatatcatccaacgcctgttcccacaatgcagtcaatccagggttggtcaacgcggtaggcaacgcggctatcaactcgctggcaatctgcgtagcgtggatatacttgcccttttttgtcagataaccccgtttaaacaacgtatccagtacccctgcccgggtagcctccgttcccagcccggcattgtccttcaataccttcttaagttgcgggtcactgacaaaagcagcggcatttttcatcgccgcaatcagtgtgccctccgtgaagtgagcggatggctgagtttgcaacattcgtaaagtagcctcattaacctgacattgattgcctttgaccatcgacggcaaactttctcccaaagaatcgtctttcccgatggatgccgattcatctttacccgctgaaaacaataccttccagccaggaacaatcactacattgccccgggtacgaaacaattgcccaccgatatcaaaagtcgcttcagttatatccatttcatgcagaggaaggaactgtagcaaataatgctgacggataagctgatacactttacgctcatcatccgtcatcttattcatatcacagggctgttttgtcggaatgataccgtggtgcgccgtaatttttttgtcattccagatacgcgaaatcaacgtccggtccagactatctaccacaatccgcatagccggatcacttttaaccacagcatccaatacttgcggaatttccgcctgcatggccgtaggcagataaccacaatctgtacgaggataggtcgtagctttatgcgtctcatacaaattctgggcaatattcagtacctgctgagcccccatgctccatttcttcgagcacaactgttgcaaactaccaagatcaaatgccaacggagccgcatgcttttcccgtttagtattgatttccaggacagtagccgtaccagtttgttggcataacttaaccactgtctgtgccacattctgatgaatacagcgtttttcttcatcacaataggtcgcagcgggtacccaatccgcccggaaaattcgtccgtcaaactgaaggtcagccaccacctgccaataaggtttagccgtaaaggcgataatctcccgatctcgaaagacaaccagtgccaaagagggcgtctgaacacgcccaatagacaaaatgtcactatatccgcattcacgggctttcacggtatagagtcgggtaaaattcatgccaatgagccaatcagctctggctcgtcccagtcccgccaaatacaacgatgccgtttgttcaccgggcaaaatattagcaagcgccgcccgaatactcacctcatccagagcagacaaccacaaacgggatattttcccctgaaactggcaataatccagtaattcccgggcaatcacttctccctccctgtcagcatcagtggcaatcaccacttcgtctgcctgtttcagcagacgacagataacagtaaactggtcagccgtctcctttttgaccaccatttgccaggaggccggcaatatcggcaacactgacgcccgccagggagcaccatattgttcaccgtaaacttctggactggcagtttccaataaatgcccaactgcccaagtcaccgtcacccccggcccagttaaatacccctgcccacgctttgttgcacctaataccaccgcaatatcccgcccctgagacggtttttcacacagaaacagtttcatcgcttatttctgctttaccgtactttttaattcaggagaaaaaacagaacgtttttcgccccgcataacggcctcatccggtagccccaaacgggtaatagcttccctgccggcaggggtttgggaaaggatatcgtcacgagtaacagcaaaactacggtacggctggacagcaccgtagatttggcgtacccagtgtccccctttttttaaaaacccgtcacattgttgacgggaaatcagcgcataatggtgcgcctgcaaggctttcatcaccagttgatcgtaacccactaataaccaaacacagcggtaacccaaaggagtgcgactgtaaacaccaatattgagcggagcgacagaggcaatctcagataaatggatttgagcaggtacccccgagagtgtagccgccagttccgctaacgccgcctgcatctggtcatgagcagaagcaagcttagtttccagtgccaacatcgccatatcggcatacggattatctatcagggaatcctggctgatccgaccggctagtgagaaaaatcgcggcatgctaataatcaccggtttattctttttgctactttcatcccggcggccattccacaggctgatagcgtaatgagtatgcaactcaatggtaagtgaggaatgcagtgcgcctgagcgaacagcatgtgtctctttagtttcagtcatggtacattctctctgtgacataaggatatcgctgagatagttgcgttatcaggctgtgaccacaattcaaaactcttttttgctccccccaaaaacctgattaacatcccataaccataatgattagactctaatcactgtatgtcttttggcccatgattagactctaatcaccgtttttatctatttgatgacatttaaaaatacccatatacctcggaatgcctgactctataacccctttaagactcatccaaagtgaccctatttatcttttcatcaaattctgccggatttcagcaatcacttttttcattacggcaggattggcctttctttgcacctctggcaaaacaggtctgtctttctgacggctggcaggaacaggctttttcatgccggggttttccccctgatttgctgtaccggggcttctcaactctccctgtctggcacgtttcatcagtgtcagtaggtaacccaccggattttttaacgagccattttccaatggaactcgcaggctatccaacaccaaatgcctctgatcagacggaagtgcctggagttgttccgtcagcattctgatgtcgtcatcagaaagctgatttcgtaacgctacaggcaacaaatgctcaacaatcgggttgtcgccatccgatggggctacgtacgtatttttattcacactgtgtgtgaaatgacgtacgtaaccgttcgattgccgaactctgtcataactcgttgattttagactaagttcggttgccgaactcggattactatcccctgtttttgtattgaattcggtttccgaacttagtctgttctggcctttgggattaagttcggttaccgaacttggctgacttattgcttgcaacgccgccatttgctgcggcgtttgtacctgacctaaccgattttccagtaaagcaattcgggaacggcgatgccgcatcatcggatcatctttaacttccatcaatactgaccaagcagtctgactaatcacccggtttttgtggcgacacgcctcccccaccgtgtccagccagttgggatcaagcgcttcagcatcatgaaatgtcagaggctcatcatgctgggcgtagatgtttcctttcacgcgccctttttcatccctgacgcgtttgcacaaacttagccagccggttattcgcaacatcagcaatacccggctgacggtttcccgggaggctttaccgctgtgcggagaggccagttgcaattgcagttcatcataggtagggaagaccgctcccgcattttgttgtgcatacagccgtatcattatccaggccatcttatcgagcggagataatcgggtatccagaattaactgacggggaatagcatcatgcacgttccccagatacaacagcccactgcgcaactgttttttttcatcaccttcagcttgagctgccagtcgggcattcatttgctccaacgtaaaagcaatgaggctatcagatgacaaaggagccttccgtgtgttatttccagatttcattgttgtaccgctcatgtgtcatcatttcccaatctcgtcctccgttacgacttaacaaccgccaaaacatgccaatatcaatttttaggcaacgatgagaaactttacctttgcctttcgccctgatccgagtgtaatttttgctaccctgtcgataacgtttcaattgttctaccgctttctttctatagacgagtggtacagaacagggggccaacaacccctgagtgatctctgtctttttcacctgtcttgccgtccctgaccaacttcaggttttactgtgttcttttcgtcttcaatccagccacgtacagcattccagactgccgtcagtgacacgaccagctgttcagcggcctgcatcatcacatccagcccatccgcactatccagatcagtgacattcgctttccacagtcgccagacctcagcactgtctttatctgtcagcatcagacatcgaccctggcgagcttcaatccctaacatacgacgacgggaactcacctcaacagaagtcaacccaaagtagtgttgcatcaattcaattgagccgcctaacatcagtgcccgatcaagacgttgcagacgtttttgctcacgtcgggcttgttgcagcattaacgcaaaattttcatgatggatacgcagcgtaaggactgacaccgggctattcatcagataatgcaagtcttccacagtcaaactgtgtaacatccgcatttcttcgtccatcaaacccagtgcttcacagcggcggagataacccgatttcaactccatgaccagttgagttaacaaggcattggttacctgggatatctggctcataaggcacctctctcaatgcaatacgatacgtctgaacaaaattggaacacataagatctgaacttacccaccacgatgacctccggtaatacatctgacctgttcccaatgctcagcaacttcctgacatccaacacacaactggacccccggcaaaatctgccgacgttgctcatcaatccgatcaccacatccttcacaatatttcagtgacaccctaccggtatgcatctcacgccgtacaacagcgatctgctcttccagccacatcgcggtaacagcctgagccctcgtgtcatcaatatcatcagacattgccattcccttctgctgagactaccgacaactcacgttgcagttcacgtaaccggcgcaacacccgaataagacgcataaatttcactactgcgacatcaggcaatactggagtatccttgtcagacccgacaaaccaggttcccaacatgcctatacctgtatctgccaattcaccgttatggtcactctcccccgtcaacgacaacagcacctgtacaaaacgtgatgccgtatgggaataagctaatcgataacccatttcacaggccgtatctttagcttcctcaagctcatccgctcctcccatttcttcggctaactcgaatgccaaacgaaacgccatatcttgtaaatgctcaatatcatctcgtaccggtgagatagaccagatatcactaactggctccagaccagtttgtgcaaaactcaatccatcagatggcgtaggctctgttaataatgaagtttgtggtggtgttggaagacagtgattaaattcacttaaagtagagggaactatctgcgataaaggtgctgatactaaaggcgcaatatcttccttatcctgtattgtcgacaactcactggataaagttggccgagtttcatacacatcaggctgaacttcaactttgggcggacaaacttcatattcctcggtctttttatcttcctgacattcgataacatccccatgcgactcaggttccactgccgaaacgcaggcagcgcttttagtcacaagaggtaccgacttttcaggcacttcagcggcttgtctatccgcatcgcgcaaatgttcagcaataggagggggctcaccaaacaactgacgacggtttcgctctttaggatcgagctccaataaccagcgatcataattaagggcaggatgtggcaaagcttttattaattccccaatcagttcatcccgtagcatgtcaaaagaatagagttcaggattatcaaagcgctgacatacctcaccaaaaactgaatcgaagtccttcccacacgatgcctctgaagaaaaactattccaggttttttgagcatcaactcgtaaagacaatatgtttactgcttgcggacgccccatacccgatatcaacaaattaggcatatgaggatataaatattgcaccgtgttatgcatctgactgatgctggtttgtgatattggaaacccttcttgttttaataaatctgtcaattctcgttgtgagatcggtcttcccaaacatttctcatgcatagaacttgcgttaaaaacaccaagcgctttctctataaacgttaaatccccccgaacatcattttctgccagatgcccaatgacacactgcaaccgaccaggccagggtttaaacaaacaagggattcggaaaaaacgttcctcacccgtttctttccataattcacataggatttggtaacgggtattgcctccatcactgaaaatgtaaacatttccactgtcttccggatctcgcgtcactttcggtacagaatccagtcctctggcacgaacagaagctttaatatcgtcaaaacggggattacggctgaggcgaggattatccgggtttggctgtaactcatccaacgttaataccattggcatttctgccataggcaaaacaacagtactgattggtgattgtggtgttttgccacgttgaagtattgcatcgcttagagaggttttatgcttactcatatatttccccttttagcaccaagatcataatacctctctgtaagatcactaaaccgggtacaggcaccatcaaactggatcttgactgttccaatcgatccttgacgatgtttaccaataatgatttcggctatcccaatatccgatgtattggcgtcatacacttcatcccggtaaacaaacaagatcagatcagcatcttgctctagcgcccccgattcccgtaagtcaccgttattaggacgtttatctgtacgctgctctagttgacgattaagttgtgaaagcgccagtactgggcaacccaattctttacccagagctttcaagctacgggaaatttctgcaatttcctgggttcggttttcctgctccgggcttcggataagttgcagataatccaccataatcaatgaaggtcgaccatacttgcgcacatttctgcgggcacgggcgcgtaataaagccggagtctgataactgttgtcatcaattatcagccgattttcccattgaattagcgtctccattgctctactaacccgtgcccaatcttcatcatccattaatccactacgcaggcgttcaagcggaatacgttccaacatggacaccatacgcatcaataattgatccatcggcatttccagactaaaaatctgagcaacagcatcaggagcactctccagtgcgctcagacagaaagccagtgccagtgcggttttccccatagaaggccgaccggccagcaggataaggtcgcccggctgaagaccacaggtttttgtatccagttccctaaagcctgtcggcgtacccgttatcccattacctccattggcctgctctaatttttcaatcagcaaacccagcccttctttcaagctaatatcttggcgcacagctttctgctcagacagcgtatataaacgctgctccgccatttcggtaatgtcagtaaaatcagcacgaggatggccagcctgatcgctcatctcatttcccagcattatcaactgacgcaagcgacttttcgcctgaacaatttccgcataagcaacaatgtttgccgtactcggggtgtttttgccaagttcagctaaataggcaaatcccccaacctgttttagctgctccttttgctctaaaatttcagacaacgttagtacgtcaacaggcaaattggccgcaaacatggttgcgacagcgccataaatccgtcgatgagcgggcaggaaaaaatcatcagcatgtatcagtggtacgatttcatcccatcgatcattatccagcatcaacccaccaagaacggcttgttcagcatcgcaagaatacggttgttcaataccatccggtaaagaaaaagggttacgcattcttcacccccttattcgccatcagtgcatcaaactgttcatgccattcagggaacaactcacaggacagacagtgcattgtttgcgcggcagcggggcttttacgggaggttttgtattcaagacggtgaacgggttgggcacgcacatgccccaacttataaatatccagcaggtcgatgcgggttttcagcagttggtatactcttcgcccaccaaaagaggacgtatcgtaacgtttatgctcgataatatgggccagttcattcaacgtatcgcggtcaagattagtgccttcaataccattcgccaatatctgaattaaaggtaatcgaataccataattctcaaacgattgcagtcgcgtcaacatacgcaacgatccccgcagaaactcacgaacatctggcaaaataggcttaatcacacccaatacaaattcagtggccgtcagcacaaccagctcggccatcacaccagtagcgccctttgaatcaatgatgatagcgtcatactgactgaacagagggtgctgcaatatattcctcagacgcaaacgtccgtcaggcgcatgaagcatggccgtaggcaggagttcatcaggatcattggaaatgatgacatccagattatttataacagaacgggaaataatctggtctttctgacccaggtcagcagtctgcataagaagttcatacaaaccagctggggcttcatactcaagtgcaaaaatactgcttgaagtgggttgagaataatcagcgtcaagaaggagagttgtgaatccggcatctgcaagaaaaccggctacattggcggcatgtgtggatttaccttcgccacctttaggagaaattacgggaagtatcttcattttgcacactcgaatttaagtaattcgaaatatgaaaagtactaacccagtatcttaattacaaaattctcgcattgattacaaaatactaacatctcagcacgaggattgaaaatcctcgtgtcggtggttcgattccgcctccgggcaccattcaaagcgcgttgattgagagatgaaagctcgacgggcgttcgatatcagaacctggaatgcataattgtagattgatcagttttgcgccacttggatataaatataaaggttctaggattaggatatctgagaaatcagatgtcctttttccgtctgagcgcaatacttacaagttctattgcaactgtcaagccatccaaactaaaatcaatgaattaattaacacgatgttgtatatcggttcttcagatttcctgattggttagaagaaggttaattctgggagactgcatcagttcaaaaaaattccccatcttgcaacagggaattatttatgtagaaaaaggcaaattcagacaacagcgagaatattctgttttatccgattagcatttcgcctctttctggctcaacatcaatatacagcatcaactcacgctccagcgcgcgcccggcaatatccagattgatatcaatatattccatcgttgtggcaatactgcgatggcccagtaatccgcgcaccatttgcaaattacgatcaggcgctttcatcagttcagttgccaaagtatgccggaaacggtgggggcccacatcaaatccacactcctttgacaaacgacgaaagaatgactttatcgtctgtaattgatcagtttcacttcctctgtctgttttggcggtaaaatagttcacacagaacaggggatcactgggttttgccccagcggcttgcgcacgttccagcaaaatctccagccgcggatacaaccatttcaccaccggcacctggtgttcataatggttcttactcccctcagagcaaagaataatccggcgcacatccaggtcaatatccccgagccggatatgtaataactgattttgccgcatcccggtataacgcaacgtatccaataccgtcagccagtaccaggtcggatataatgcacagcgggcacgatgattatcccctgtccgtcgttcccgctcttcaaattgccccatcgtgagatacaaggttgtcagttgttttttggtcaatgttttctttttatttttgttctcattaacctctacaccaataaatgggttttccgtttggggcagtattttttcttctatcgccaaattaaacactgaccgcatatgcgcaatcttactgttccaggtcacacctttcaggccagactgatgcaacacatatctgcgccacgccaggacctgttgtcgggtcacttgagccggccgattgctgacacctgcaaacaccttaaatgtattcaccaccttgcgataactcgactccgtatccggccgcaaaattctagcaaaaaaatactcatccagcaggttatcccaggtcatactgtccatctctacttcctcacttcatcaatttaaaaacccattgccgggcgcagaaaataacatattgttattaaagatgcttttcaggaaatcatgagaaaagggctatcctctggtacagaacggtcacgataaagcaacgtgtttttgattaagtagccatgaatacgttgataggagccagtccgatcagccgaatcataaagatgacaacaacaaaaatactttccaccactgactcgatgtcgtcccaaccgctcaaatgcggtttgtacccgtttccatttttcgctaacctccttgccatccacctgcttcttctcactgagaaactggaagaaaatggccagcgcactcacaaacacaaaaccactgaccagatgtatccgggcttccggcgtattaatggtcattaccccatgccttaatccagcggacagccagtcccagaattgctctccaatacagggtgtctcaatcgcattttcgttctgccatgttgcctgaaccgcgtgttgtgaaggcattgatgtgtatggcggtacgatttccgcttcactcgccataatctgttctgtcactgtgcccgcgacattcatccccattaatgacaatagctgttgcgtgctcccatccgactgtccccctttctccggtgcgactgtcatgacggcagaagaaatctcatcaaccggcctcacggctgatgaaacaatttcagtcatcgggttatcttcctgtcgtctctgagaaggcagaacactgtccattgcggttgataaaggcgtagcagaaacatcgggattgcctgaaacaatcatttgcggggatgctgccgtgacagagaatatttctgatattgtcggtgcacccgctttattcaaagcttctataattatctgattgattgcgtcatcttccttcatgtcaccggataaaatacagaacagcgcaggcaaggcatgaggtactgacgccagccaggtcaacgccttagccggcaacaaccgcccggcgagtacccccccgaaatgacaggcaaccctcgtctccacgggaggagttttgaaccggaaacgatacggcccctgcggcacaacccatcccgggtaccagggttggccttcatccagttccccgtcaaactgggccaaaacaggtaaaaaatgaaataacgcagcgtaaaacaccaccgtgttccatatcacactttgttctgcctgcgtttcaggggccacccccggcggtaacatctgtcctttcgccagacgtacggcagaggcagtacattgcagagtcacatctatcaagccgcctgggtgggcataaggcccctgcggtgctgccggaagttgttgcatcaatgcaacacactcatgtaacggagccagccacaatgcctgatagtgtgttttaggtaatgcactgttgtcccacagacactgtaaacactgccgtcgccgggaaatatccagcaatagcctggactcagacggcaaaaagtagcctgctttgaccgtttttgggatggcggtgggttgtggaagtgacttttttcctgcggcggttcccgccagcaggattttaatttttttcaacacgattaatctcctcttttttcccaaaaccctaatacatcctctggcagggacaaagcaaaactcttttccgggaataaaaattaatcgatgaaaaccacacgcaatgattcaaacgtttccaattccgtcacgggtaaacgcagcgtgtatccggtcatttcgttgaatcagtcatgataagtacaaaaggcacatggcggctcatgtaagaaaggattaagggaaatagaatgtgtccagtgcctctgggaagcactaccgattcagaccaaaacgtgtcagggataaacaaaacaacttcaatcgatttatttttcatctccgtcctgttggataaaactccggcccaagagccggaattggcttaatccagtgtctcaaaccgtttgaacttcatgctgctgacgatttttcctgagacgacacgaccagttccccagccagtgtaccggagtatacatgacccgatgacgttcatttgtcagcgcattacctatcaccagctcgccggggatcgcctttatgattaatcaatacagacaaaacgtgttcctgagaaaaggggggaacacgccccctcagaggaaatattccccaatgggtaaatcgccggcgtcatatccgccggcaatagcgttatcagacgctcaggtaaacctgaacctgtttttttatgtcaattcaccacaagaaattgccctgcgggataacattgtcagtgcactaaccgtcatgtgaaatattgccgagaatgtagtccggtccgaccactttacgggtaccgtcctcatcttcctcaccaaattccagttcatcaataatacccgcttcccactgcccattcaggtatttgtcgtaaccacaacagccacagacctccttaaaataatgggtgatacggcagtgatattgcctggataaaggaactatgattttttcataccacggctccctgagtgttttgtcaaaatgcccggtcagactgccatcatcatggtgcttccaggctatatcataacctcgcggccgtgtcataccgtataatcggaaatacaactcatgagtcgtctcgtgatcctttaacaatccaccgtaaaatccattgatttcactcgcaagacgggtcggtatcagcagaaacaagtcacaaggaaccgtctctgtcagcctgtcatcaagatgagaccatagcatttccgtgtcacgttctccgttccaatcaaccaaaccgaaccagtcacaggacttttggttaaataaagccatgatggttttctgcgctgtcgggagcaacgtctcccattttcgctcggccagaccactttgttggtatagcctgtcaatctgttggctagtgacttcatcaagcgcaacattctcttttaacaaggccagccattgctcaaatgcccaattttccggtgacatttcacccactccacccgctaccagcgctggataaagtgggtaatctattgtttcagtcggttgcagaagaccagcacagcccgcgacaaacagcttaatactttgatggatcgcctgcccgtaatagggaattttgtctcccaatccccattgtcgcagggcatccagttggtcaggttggccagtgatatgcaaacgattagcgtaccacttcgacatagtaaaaaatcctctttttttacctgaaaaagggcacaccttgtgaaggcaatgtccccacaggcaagtgataagttcagaaatgtgaaaaaaggctatccggctttcggatagacccattcaagttatttataaccggacagccggtctccacaattttgtggcctgcacatcagagcgctttctctttccaaacgccgcgataatcctgcccgtcatcacccggtacaaatcaggccggaaacgcctgccgtgacgatgggcagctttgttcttgcggacagtttttgggaatgttttggtcttaatctttttcatcggtaacgctccgaaaataaaaacgggcgttatcccctgacgggaaataacgcccgtcagggtaaaaaaacaaccaccgacttacccgcaaatcagggttaactctcaatcaagccgctaactttcgtatgggggtaatagtgctctcccggtgggttttccgcacaaactgctcatctacccaggtgattgcctcatccaccacatcccgataatctctgactgttgggttgttaacatcttcaatgtctacatctgatcgaaaactcgctatcacacgatcatttttgtataccacatcaacccgaaactggacgggtgtcatcaatccatcggagaccgcatcgatatagtcttcgagataccctgactcaaattcctctgcctcaatattgtgcaaatcctgtggccccattaagacatcgatgtaaccgatagcgaaggaaaaacgccgtattaaacggggttcaacctgtaagtaacgaagaaattgacccaaacgttcaaaacaataccgacacgtttctgtcaactgcttatccaaatagtccataaaacgtgtccagtattgttgtgttttgctgaactgttccagcccaatttgctcatcttccggcaggctgtcctgcgccgtcagacgcaaaaactgctctgccgtcagattcagtaacacggcggtatccggccggataagggtatccacacgaccactgctttccggatgggtataaggcatcagcatcggatcctgataaacatgagatatcgcctccattccccgtatccataacgtcaggatacgctcactatttctgcatctggcccggtttgccggatcctcagacaaactgtccaaaagatgagtcatgatgggcaaaagtaactctttggtaaactttatatgggtattgacgtaatctccctggctctcatgaaacagatagaaaatcgcgtcgtcatccagcgccagccccattcgctctgcgaattgatgccggatataaaaacgtaataaagacataagggaaatctcgtgattgacggggttccccctgtatataattcgtgattgagcgaaaggcttttctaaaatctgaatatccttcttcaggaacccattcactttttaagctcctgaaaaagcgctccattgggctattatcccagcaattacctcggcggctcaggctttgtttgataccataacgccacaataaccgtctgaacgctttgcgggtatagtggctaccttgatcacggtgaaacatgacaccttgtggcttcctccttgattcaaacgccatttccaacgctctctttgtcaactcagagtcggcagagaaagacatcgcccaaccaatgggcttacgagcaaacaggtcaagcacgacggccagataggcccaacatttacctgtccagatataggtcacatcaccacaccaaacttgattgggctcggtgaccgtgaactgacggtcaagatcgttaggaatatcaagatgttcttgttcctgatgtgaatagcggtgttttggctgctgacgactgaccagccccagttcagccattaattttcctgcccgccatcggcctaatggtatgcctttggcggtcaccatggcggcaatcgttcgtgcgccagctgagcccttgccctcattaaacgcttcccggactaaactttttaacctgatgcgctcagtatcgggctttttcactcgatggtgccaggcctgatagctgctacgataaaccccgaacagttggcaaaggaaagccactggataatgcactctgaattgctcaattaacgagaactgttcaagtagtccgacatcaagagtgcagaagctttttttaatacttcattttccatttcaatacgttgcagtttctttttcagctcacgtatttcaatttgctccggcgtgatgggcatggctttagaagatttaccttgccgctcctgtctcaactgacgaacccagctccctaaggctgatttgctgacattcatcgctttagcggcttccataacactgtaattttgatcaaggactaactgggcggattccagtttgaattcagggctaaaacttcttttcatcatgtcacctgtttgattgttgaagtaaaaatatcacctttattacggtgaccaaaattactgtgccacatcaggcagtgtctggctgagaggttggtgcattttgttattgtcggcaatccagtcacggaaagaggaaaaactcagctgatgctgttcgcaatactgttttcgggtcaggtcactgtggcgccattgggtcacatgttgctgtttttgctccggggtatatcggctacggctcatggtgttagtctccaaatagaaaataaggaagcagtagcgtgcatgggccagagggggagaacaaggtgaggtaaccgaacgtttagtacgccaggcaagctggcgatagaacagagggtgaaagtcccttccgggtaagagctagccactcacctggccctttagctatgcgcgactgtgggtaactcctgtcgtgaagtgttagcgaaggcactcacaggccaggtattgagccacgaaatcggtaaatcggaggtggtgatgcagttaaggtaagcagaaacccacaatggtcaggttgtattggcgaaacctgaccatacctcccggggtcggagaccctgtgcatgtgaggaagttcgtcgcgcggaacctgggagatcctgaacggtttcccatcgtgagcagttgggacgataaggtctaagtgtcaaagcagaagccttagggagttcaggaagtcggacgggagtatagtaccggagaaatcagtgaacaaaacagaaaacaatgtggcggaattgatggagggaaggctcccgaccaaggggaacagccaacagtgcgcccgtatccggacacagagccggggaaatacgacgttacgcctgctggctgtgcgaaaagcagcaaagagggataggaaacaacagtttactcacctttttcatcacatcagtgaagaacttttatgtcagagttttcagcaacttaaacgtcagtctgccccgggctgcgagggtatcacatgggaaaactaggcagaaaatctgcaaaacaacctccatgcgctccacggcagacttcatcgggggcaatacaggccccagccggcaaggcaggtgatgatcctgaaagaagacgggacagaaaggccattgagtatcctgtgtctggaggacaaaatcgtgcagcaggcggctgtcacggtcttaaatcaaatctacgagaccgattttctcggcttctcgtatgggttcagaccgggcagagggcagcacgatgctctggacgcgctgaatgtggccgttatggagaggaaagtcaattgggtgctggatctggacatcagtcggttcttcgataccgtggaacatgactggctcatccggtttattcagcacaggataagggacggtcggatggtgcgattaatcaggcagtgggttacggtggggatagttgatgaacacggtcaccgacagaagtcgcattgcggcacgccgcaaggtgctgtcatatcgccactgctggcgaatatctatttgcactacagctttgatctctggctcaacgcatggcgaaagcgggtgcaaggagaggtggtgatgatccgatacgccgatgatgcagtcctgggcttccagaaacatcaggatgctcgggcgtgccaatccctgctacaacgacgtctgatgcagtttgggctgaaggtacacccagcgaaaacccggctggtacgatttggccgctttgcgttaaagcaatatgaggagcgaccggagaggggcaagccggggacgttcgattttctgggatttacgcattatataggacgattacacacgggcaaggatgcggtgatgcgcaaaacccaacgaaaacggcgtcaaatacaactgaagcgaataaaacaggggctgcggcaacggctgcaaaccgcccggaagaaacgggccggtggctgaaacgagtggtagaaggacacatcaattactatggcgtccccttcaacagtagagcattgtgtcaatttgtggaagaagtgaagctgatgtggctgaagtcactgagacggcgaagccagcggcacaaaatgacgtgggctcgttacagtcagcgggtgaaaatggataccgtccccccgaactgtgcatccttatcctttgcagcgcttttacgccaaacacccgaggtaggagccgaatgcgttagtagcgcacgtccggatctgtgcgggggggtagccggtaacggctattcctaccgcgaccataaccactcacaaaatacccaggcccatacaccaaaagaaacttttaccgggcctcatgcccggtttaccctttatgttaaaaaatggtcttctgattatcttaactcctcattaatggcctgccgaacaatcaacttggcagcccaactcgttaagttgatgattccgtcgttttctaaaccaaaagtgtctttcagaatagtcatagcctctgtaccatataaaactgaaatcaacataataatcttatgtattgtgtcatctttaagctgaccttttagcggcgctaacgccgtagaaagtgtctctttgcggttactttttttcttcaaaacaggtcgtttgtggttatcttcaccggataaagattcctgccagcgtaactgagaaatacgtaaagcatccctcatcagtgcctcattggcttctatttcttcataaccccatcttaataatttctcgatattttcctctgcatcatcgcccataggggggataacgaatgatccaatgacttgttttacaacatattcgacaaaatcactgtgggttgaaaagtagctgcgcaacgtgaccttcgcatattcagcttcattagcaatctcttcaggagacggaaattttttttcacgatataacttcagagctgaatgagtgatacgttccagggtacgacgccggactggcgacagattttcttcatcaaacagaatcatttaatccccttaaagttttaaccgtatagcattcataataaaaaatatcactaatgataaaaaataacttgcatgttgtaaaatattacaataggtttacattcgtctttgaactaggtataccacatagggtgaacactatgacgcgatttgtggttgtcgttggcacagcagacacaaaactggacgagcgggtctggttgaaatgttgtttacacctcgcaggagttgattcaatcatcattgatgtgtctacatcaattcctgggaaaaatcatcagaataaaaagatagatattcattcacttcaggtggctgagtatcatcccgccggcgctgacaccgttttttgtggcgtgcaaaataaagcgataaccgcgatgtctgtcgccctcacgaatttcctgaacagttcaatcgacgatatcgcggggatgattggtatcggcggttcaggcggaacagcgctgattatgccggctatgcaaagcctgccgatcgggttgcctaaaatcatggtatcaacgatggcgtcagggaatgtctcggcctacgtcagggccagcgatattgccatgctttatacggtaaccgatctcaacggactcaaccgtatttcccgttcagtcttgtctaatgctgcaaatatgatagcgggctctgtcaattattttacgccattggctgatattcataaacccgctttagggttgacgatgtttggtatgacgactccgtgcattaatcagattaacattaaagattatttggctgttgtttggattattgcctgtgagttaagtttgattgttgaacctaaattaataagaaataaagtgtggaaacaagctgaacgcactttttaatatgaattccctttaatgaaatttacgattttttttaattaaaatggaaataaaaatatccattcaagaataagggttttaatgatttaatatgtcagataatcagaaagaaattttaaaacggctcaggctagagccattgatgaaaccatcggaattagctgatatctttgggatcagatgttcatgtactccagggcataaagacattgttcactttgaacaagaatgctcagctttagtcttgtccttaaaattcaccaataatcccagcttatctcataataaagtgaaaaattttttggaatcaaaatgaaaattattttggcagggtaataacgcaaaacattacttgcaacagtaatggtcatgaatgaacaaggacgttttttagtaatagtaatttgataaataactaggaatcatggtcctgtgttcatggacattggtaagaaattttttgccgatatgtctgttattagccttttcatggcggttctggtgggagaggttttggttttactcgccggaaatgaacactgattcatgcatcctatttgaatagccaccataaatcaattaggggaagtaaacagagatgataacgactcaaaatgactggcatccggcagatattattgctgcattgcgtaaacgcggcaccacacttgccgcattatcaagggaatcgggactgagtccatcgacactatctaatgcattaatacgccggtggcctaaaggggagaggattattgcggacagactaggagtacatccttcagaaatttggcccagtcgatattttaacaagaatggggatcccattaagttaaattttcgaaattatttgaataacagcactaatgataatagtcgatatgctatccaattctaatttaaattcaccatgatttttgtgtattcagagggggtactataaaaaaataggtttcattagatcaagctatgcatatatcagatctggcaacttctttatatgaggtgatccttgaaaaaataactaaagaatgttcataacccttatcgggtcttattacactggcgtgtgatataaatcaagaagtttatcgtactcttgtcgcatataatgaggaaagagatgctaatgttattaataatccagggttggttaaaactcttttaaaaatttacatgagaaagttgtaaatataatttaagcgctacctttgaacctttatttatatctcttaatcaaggtcggtagcgctttctttggtaataactctgatttattgatagtgatgaatattcaaatactcccgctcccctatgtaagcagcacattcaaaccatattgacggtggctaagaagtgagatcgacccgttcatgcatccggtttgcaggccagtccgcaatatgactaatgacatggcgtaaccagacctcgggatccactttctttagccgacaggtaccgataagatgtacagaagggccgctcgttctccatctttgtcagcgccggcgaagagccagatggtatgacctttatatcatcactttaattttcttggtcgaaaactctgtttttcgaacaggcattgagttcaatttttttatccagaactcagattatatctaatcagaggattggtaacagaaattatcggcaccaaaagaaacttttaccgggcctcatgcccggtttctttactctttttgtgttaaaaatggtcttctgattattttagttcctcattaatggcctgccggataatcaactttgcggcccaactcgttaagttgatgatgtcatcattttctaaaccaaaagtgtctttcagaatagtcatagcctctgtaccatataaaactgaaatcaacataataatcttatgtattgtgtcatctttgagctgaccttttagcggcgctaacgccgtagaaagtgtctctttgcggttactttttttcttcaaaacaggtcgtttgtggttatcttcaccggataaagattcctgccagcgtaactgagaaatgcgtaaagcatccctcatcagtgcctcattggcttctatttcttcataaccccatcttaataatttctcgatattttcctctgcatcatcgcccataggggggataacgaatgatccaatgacttgttttacaacatattcgacaaaatcactgtgggttgaaaagtagctgcgcaacgtggccttcgcatattcagcttcattagcaatctcttcaggagacggaaattttttttcacgatataacttcagagctgaatgagtgatacgttccagggtacgacgccggactggcgacagattttcttcatcaaacagaatcatttaatccccttaaaattttaaccgtatagcattaacagtaataaatatcactaatgataaaaaataacttgcatgttgtaaaatattacaataggtttacattagcctttgaactaagtatgccacatggggtgaacactatgacgcgatttgtagttgtcgttggcacagcagacacaaaactggacgagctggtctggttgaaatgttgtttacacctcgcaggagttaattcaattatcattgatgtgtctacatcaattcctgagaaaaatcatcagaataaaaagatagatattcattcacttcaggtggctgagtatcatcccgctggtgctgatcccgttttttgtggcgtacggaataaggcgataacagcaatgtctgtcgccctcacgaatttcctgaacagttcaatcgacgatatcgcgggagtgattggtatcggaggctcaggcggaacagcactgattactccggctatgcaaagcctgccgatcgggttgcctaaaatcatggtatcaacgatggcatcggggaatgtctcagcctacgtcagggacagcgatattgccatgctttatacggtaaccgatctcaacggactcaaccgtatttcccgttcagtcttgtctaatgctgcaaatatgatggcgggctctgtcaattattttacgccattggctgatattcataaacccgctttagggttaacgatgtttggtatgacgacgccgtgcattaatcaactcactactgagttaaatactcaatacgattgcctcgcttttcatgctaccggcaatggtggaacaagcatggagaaattagctaaggacggcgaattggtttgtgttttagatattacattaacagaaattgccgatctgttatttgggggtgttttgggttgtcctgacacacggttagacgtcattgcaaaaaaaaatattccgtggatcggcagtgctggtgctttggacatggttaactttggtgcaaaggacacagttccagaacgctacagcaacaggctgtttattgagcataattctcaggtgacattgatgcgaaccacacctgaagaaaactatcagcttggtatctggatagggaataaacttaataagtgtgatggacctattcgattcattattccggaaggcggattctctgcgctagattgccctgaacaacctttttatttacctgcatcaacacaggctttctgtcatggattaaaaaaaacaataaaacaaacagaattgcgaaaagttataaaaacaccttttcacatcaattcaccacaattttgtgctcttgtaatacaacaattcaaggaaattataggactccagggaattcctcatgaagaaaaaatataatcagattattgaaactctaaaacaaaaagtcgaacgtaacgaaactattattggggcgagtgcaggtagtggtctttcggcgcgttgcgaggaagccggaggggcagacctcattatcgtatataattctggacgcttcagaatggctggcagaggatcattggccggattaatgccatacggtaatgcaaatgaaattgtcagagaaatgggtaatgaaatattaccgatagttaaggaaacacctgtattggcgggtgtctgtggtactgatccattctgtaatttatctcttttcctggatgaactgaaggcacaaggttttgctggtattcagaacttcccaacggtaggacttattgatggaaagttcagaaaaaacctggaagaaacaggcatgggctatgcactggaggtgaagctaatccgcctggcgcatgaaaaaggaatgatgaccacgccttatgttttcaatgaaaaagaggctgaggctatggcacaagcaggtgctgatatcatcgtcgtacatcttgggctaaccactggcggtgatattagtgctaatacatcatatgatctgaaatcttgtataccaatcattaacgcttgtgcttcggcagctaaaactatccgaaatgacattattactttgtgtcacggtggcccaatttcggaaccggaagatgtcgcttatattttggctcattgtcccaattgtcatgggttctatggagcgagttcaatggagcgtttgccaacagaacaagccatcaaacacactatccagaaatttaaagaaattaatcggagttaatgagaattatacttaagctatgtggaaacttagtactgcaaccgtaatatctgttacggtatgacgacgcattgttttcttttcctcaaaaatacgggaagatgcccaatatgtcatcctaccggtccgcaacaactcagtctcgcttgtctccgggggcttactcagcgatgttaatgaaaaaatggcgggcaactggctggacagaagcccctacaccagatggcattcaatacttttttgaacgtgctgatcgaggcaaaaacagccctcaatattctacgtctagtgcgtgctgatgccgggcaaagtgcacggtgacgacatctcggtgccagttcagacctcgggaaagggaaaaatcagctctgatgagtatcgaacaccctgtcggcgatagtttatgcctttaaaccggaaaaccatccaaaaattttccggtttcatttgacaaagctattttatctcgtttttcgaagttctacgacgatattcaccactcgctttttcatgcatggtaaacagcatcggtaatagagaactcagcgctgataggctatgcccgagccgacacaaactctctggagtaaattcatggatattattactggcaaacgacaacattgagtcaccaagaaaagttattccatgacaaatgcccatagtattttctttggatgattcaattagctgacacagtacagtatcactaacacatgagagatccagtgatgcaatcgcatccgacatgccagaccataggatattcacatcatattgcttcccaattggtttacaaaaaattaaaaccaaagaaaagcctgtaagcacggtatgtgcttcggtttctacattagattgcgcaaatgtataacgctttgagtatgaggatatgttactattcacattagccatacattagttcctgtaatgttgtggttagacgctctgattgtgttgcagcactttcagagcgttgcttttatggttcctataactgtcaccatattctttcgcctggagatcaatatctcttcctccttttctggtaacgggaaggccagatttcatcaggcttctgtcccagtgtgtttgcaataattgtttcacctttacaccagggtctttgcaaggcattagataacgttgacgatgccagccctgcttctctagaaacagccgccaatgacattcctttcttttttaacgcagcgataatatctgccgaatgccaatcttttttctccacaataattctccaatcaggtataactatttaataacgttgtaaaacagcaagtaacttcgctgcttgaagctctgctaatggtatgtttcacttcaatctatatttcaattaccctaaaaagatgtcagtgcagataatccttcaaggatcattcactgctgtagatatttatgatctttaaatagaagatttcgtaaaaaggaagatataaacaataagactcacgaggattctttccttgaagaaggaaaagaaacctttaaaaacaggttaaaacaaaatcgtcgttcaggcgtccattcatcactatcaacagagaaaaccttttcgttttcaggtaataaaccgcgttccacccattcacatctccatcgtggtaatactcagtcaggatgtacacagcaaaaacagattcatcataaccgtttatagtaccgcggtcttatcccttgacttcaatgatgaaaaaacaaaccggtgctgactatgggaagcccttatagtgctttaaattccgttctctgaagcgacctgatttttagaaacgcgcctttggcacataaccaaaggcgtgtccttaacagttcgtattagttgtagtttacccagcagtcataggacgaaatgtacggcggctgatacaacccgcccgtgatatttccgactttcatttgcaaggtaatcctgcaatctgctggaacattcgatccagccgcattgacagtggccgagtcgctggctacatccagaaatgcttcccatgcagcagaattattcggggtggtgatgagaagacgcaacgtgatttgattttgccagccagcccaattgagtcggtcatagttacacagaatggtgctcacaattcctactggaggcgtctgtccgggagccagggttgtaccagaaacatacaccccgccttgagttggtttaggacctaaaccagagcgataccaacgtggtccggctagttgcgcgagactgtcctcggcttcaatttgctgttgtagtaactccagcagagatgaatcttctttagttagatctacctgggtcaacgaaacagtttgtccctctttcaacaacatatcagagggaagaatcagcttactcattcatattctcctaatttatatcgaaaaaatagttacggacattaaaacatcacttgcaaatgcaacacaatcaatgcggctcattaaaaattagaggagtaggattgaatcctattggtataagaggaaccaatcgtgagaactactcagcaaatgagtattaccctccccaacaacatggcggacgtggtcaagtctaaagtacgcactagtgaatacgcgaacgaaagcgaggtgattcgtgatgggttatgggcactgatggcgcgggatcgtactgtggaaagctggcggcacaatcaacttggatcagcggggcatttgacggtttcgcactgatagaaacaacctgaaccgtaaattaattctttccagcactccccctcaacaaaataggtcccgtttagcagtacgtgtttgtaaggcagcagagatatgcaccaaggtatcgtcgatcacgctctctccctattttctcaactcatccacaatattgctgattttataggtattccagtaccgtatgacgttagacactaggctgaaagcgctagccttattcataatttcctcataatcaccagtagtaaattccccctagttggcaaagtgttgtagtcaataaaaattggtcactagcttagaattttcccaaaataatccgcctgtcatcaaacaacgtccacgatgatatttcaggaactcgggaacaggagaagtgatataccaatgccagtattgaaatctttagggtatagtggataatatgttgatttatagaaaacctcctcaatcgagtaaaataataaaattgataatataacatgatattatcaagttagacttttttaaaacaccatatttcatcaagtttaatctatataaatgaaatataatttatgatgaaaatgttttaatttttttattatttaataccatgagtaaactaagtaatgaaatagatgcaatagccgatggaatgaataaagtcataagtacccctcgatagcctaatcctaattgcactagccatgctccaaacatcgcacctaatatccctcctgcacgaccaataccaagcatccacgatacacctgtagctctggaggttgtagggtaatgaagtgtagctattgttcccatagatgcttgtgcactgttcattgtcgttccggctaagagaattaatattcctaaactgattatattatcaacataccctatagagaagagcaaaatacccgttatgagatagttaaatgatactatcttatgaggagatagcttatccatgataattcctgatattatcgtcccaattccaccacctaaaggaaataaagcagttaaaatagttgcataacttaattcaaaaccagagtctttgataagtataggcatccaatttgtgacaacatagaatattaataatcccataaaatatgcgttccaaagaagcaaagttgatgataagtgtccatgggataaaatttcattaataggtttaattttttgcttttcgataaattttaatcttgaaaaatctattttattataattttcaccaactattttcttgcaaattctctttattttatcttctgatttgtttttattaatcaagaataaaactgattctggaagaatgaaaataagtgggacaactaaaagtatagggataattccgccaataactagcatactctcccaaccaaacttgggaatcatgaaggagccaagaataccgcccatagctgctccgaagggaaatccacaaaatacagagttcaccataagtgactttctattttctggtgcatattcagaaatcaatgtcaaggcattagacatagcagctccaatacctattccggttaataaacgccagaatgataattggtaaacagttgtagaaaatatcgttgcaatactacaaattccaaacatgaaaacagaaattacaataacaggtttacgtcctagtttgtctgatataggacctgatgttacagctcccacagataaaccaaccaatgctgaactcatagcaattccaaggtctgtttttgaaatcccccaactatcaacaatagcaggagcaatatagccgatcagagcagtatcgaaaccatctaaaataagaatgctcaaacataaaaataatattttgatatgcaaagatgatatctttgcaaatctaattgtgtcttggacactcaactttattgtagaattcattttattaaccaatgcatcaggtgaaaagcaaaaagggactttaagcgtccctttgttaagttagcactaactttcaatctcgaattgacgtttagcacggcgtgaatcgtcatggttatatgctggtactttaaatttacgcaattgttcagggcttgcaggttccgactcactaattggttgatcacctccaatagtcacccgctccatatatcggcgatttggatagtaatcatgaacagcagcatgctgtacagagcgattatcccacattactaacatgtttggtttccaatggtgcctatattgatattcaagtactgatgttgtattaaataattgtgccagtagtgcatcactatctcgttgatccatattttttatataacgagtgtaatttgggttaacaaatagggttttctttctcgtttttggatgaattcgaacaactggatgggcgattggaggatattccaactctttcttttgcaataattttttaccttcttctgtgtctggaaaaagatatttatacgatgaaaagtcatgtatagcttccaatcctcgaatgaaatcttgagtttttattgaaagaaaatcataagcagttgtcatactgctaaaacaagtatcaccacctatttcaggaacaattcttgaatagagcattgtagccataggggggcaaagtttatatgtttcatccgaatgccagcgatcggttaatacaggtggattaccactcttataatcaaatactattaactctggatttttttcactgttctctgcaaaaggatgtacagttaactggccaaaatatctccctatacgcattaaatcttctgatgtgatatcttgatctggaaataccaatacttcatgctcttcaagatctgattcaatggtttttattatatctttatttaatggctgatttagtttgatatcacgtatttctgcacaaaagtatggagttagtttacgtatggtatattcaattttatcactcattttgttttctctccaaaattatcaccgacagattttaaattttattttttatgactttgtttactattggtttttttattgctgaaataagcaggatgactgaacatatcatcataggaagaaatacataacttggatttcctgaaatatcccatgataaaccactaattactggtgttataactgcacaagtataaccaactgtcaacattagtgaagtagatctatgtacctcgtgtggctcgctaatcatactaggtagtcctaacattagtattaaaacaatagcagaaaaaaaaccgatgaatgctgaactaataactatatattcagtaccaaagtacataatgctgctaaaagatgcaattaatcctattcctgatatcaaatatggatatcgtagttttgctacagtggcgcttgtcatcataagaataatagaagcagggatttgtcctaaatttaaagcaaccaaagaaatagatgttaaatcctcaaaattagtttcatgtaagtaacgtggaataaaaaaattggttgcaaaatatgttgcatttacacatcccatcattaatcctaacttccataatataatgttattccattctggcacccactttatatttttatttatcgatattatttcatgtttatttttaggtgctaatttgtatataaaaactgcaattattaatgttatcgcagcccaaaaaacatatgtaagtcgccaagatcccaacataggtaataaaatagattttgtcactgcaacaggaataacttctcctccaagaagaaggccattaacataaatagccgtcgcaatcacaatatgttttggaaaccaatccttcacaatagaaggtaatgcaggttgcataaaagcaactcccaaccctgttatcattgtcgccatatacatgataattatatcatcggcggctccacggaatgcagaacctaaactggtaatcagcaaaccaaggataagagtctttattgcgctcgttcttgcaattaatagagagcctagaattgcggtacctgcaaataatactgctggcaagccagaaataatcccaacttgagtttcagttaaatttagatcatgatgaatgtcagaaatgatgggtggggtagccaatattgtcaaacgcgttcctgcaccagctagccataataaaaatagccttataaaagattttattgaccaaaaattatatatttcagtgtacggtgcattcattgtcttatccctattaattaaatatatttatacccgtcatctttcaagttgcttctttgttggctgcgctcccttgccgccgtgatccatcttgaaatccattgggtatattatcttattgcttctaaataacttctattttgcgaaacaatgcaatttcatcactatcaaaaccaaggaaattttttaataaattttctgtgtgttgcccatgctctggagcaggattacgtactgtatcaaagtcagagaaagcgcttagatgcatgggttgacctaccagagtcaaatcgcctaataatgggtgcttaatagaacatttcatcttcaaatactgaatttgcggatcggacatagcttgtgctatatcatagatgtaaccacttggtatcccattctcgtttagaatttgtattagctgtttactctcgaatttccgtgttacagcttgaatttcatccataagctgctttctgttttttgaacgattataaatatctgaatattgaggattcaaataaacttcctctatatcaagtagatgacataactttcggaatttttcatcttctgctgccgcaatatttatttcaccatccttagttcttacgacaccagtaggcattaatgtcgggtggtcatttcccataagctcaggtgttttgccatctgcaagccatcgagcgacttggaaatccatgatagctaaagttgattcaagaagtgaagtatatacccactgcccttcacctgttttttctcgatgatatagtgccagtaaaactgcctgagctagattcatgcctgagctaatatcagcgatagcaacaccagtcctgagtgcaccgctttcttgagtacctgtcacagacataagtcctgacatgccttgtactatttgatcaacagctggtcgagaactataagggccattttgcccaaagccactaatgctgccacatataatacgaggattaatttttttcaaagattcataatcgacacctaaacgaaacttaacttcgggcctaaaattttcaagcacgatatcagccttacaaaccaaacgctggagaatctcctgtccttgctttgttttcaaattaactgataagctttttttatttctatgaaggttttggtaatcaaaactttcacgagcgccccccatactgtcacctttatcggtaggttcctcaatcttgataatttcggctccccagtcacccagtagtcgtgatgtgactgggcccgccctatgccgcgttaaatcaacaacaacaattcctgataatggtaaggccgtcatttcgcacctcattattgtgatttaaatcacaatcaatgtaattaaatttagtaatttcaatgtgctttatagtcaataccaactgttaatctgatatttccctttccaggatcacaacaaattttcactatagaaataatacctatttctttgatggtgtgaatattttttatcaaaaaaaacctcacttctcaaagaaacccaaaaaccaaaaatggtcttgctcatgtctacatctttcggagaaagaattcccaaaattgatgcaaaatgtaggataaaaaattcattctcatttaattatatagaatgcaacttagatcggatacacaattgaatctgtaataatatctgctgtgcaaatacagagacgctctttaaataaagcagtaccacttttgtattcgataatatccttagttataccacttattagcaacttattttcttgaccacatatgctttcatgaattgtaaatattgtttctgtattggctaatattttctctccacagtgttcgagttttgtcaataatatattagatgttatcctttgttgtactctgtctctaaagtaaattgacccagataacgcggatgcacggtctatgagcattttctttccttcacaaaaaacaaagcatagatcccatccattatctatattctgttttgaagtaattcggtatatacaatcatctgtaaaatatgatgcccaattatctaatatttttgagtctaaatttttgttgtataagctatacaacctattgatagtaaaccaaattttataatcatccaagattcataactcctcggtaatatttataaaatccacggatagccgcttctgtcatcatgtggtcttcactcgactcaccaacactagcttctaaaatgatttcggagtctggcatgcttttagccccttcttgggttacagccaaaatctcattatcatctatggtaaccaatcctgaaggaccgagtaggtttgcttgaaataatctccgtttcgtcaacgcctcagattcattttcatagccaaaaaaagtccaaattttaatacaactatctgtaccatcaggaataacatgacgcatagctaagcaattgagttgttgcagcaggataagatttggaaaaacagtcataattgcgcctgtaccatggtcatattcacgctgatggtcgataattctcggatctaaaagtgataactctgtttttgtctctgcattttttttaatttcagctttggtgaaagatgctgttgacactaatacactgcttttgccagaagaacaaacttttacactagttttttgatctgaacgccaaataccgaagtttttaaaaaatgaatgcagaagtgctgcatgaaatggatcttttacattttcaatttgaagtttccaattacaattaactctatgctgcattttcccaataacttttagtttcctaccatcacaaacacgatcaaagtatgaaagcatgacagggtctaaatatgtttcaaatggttcaatatcatatgaaaaactcgcaaatacaacaccatgtctctcagtcacattaagagcttgcaaaccatgttcttcaggatgaaaaaattcagacattccaccttttccattaatcccttttctaaaaggcatcccagctaagttaccctctaaactaaatgcccactcatgataaggacatacaagtaacttagtattaccctgagggttatggcagatctttgctcctctatggggacaacggtttacaaatacgcgcaatattccttttctatcacggattaaaatgacaggaatatttcccacaaatgtttgtatatagtcaccaaaattttcaacttctgaagaaagcccaacataattccatgtgtttcccagaaaaatatttttaatttcttgttcatatatctggttacagatataaattttggagggcacccttcgggtgccttctttagcccattgaaggttcattaaccaactcctaggattcatttcctattgcactactttcgtatactgttaaatcagcgatacgtgacattacagtcattaacatagcccagcctttattttggatctcaaataaaggttttccatctgcaatattgtagttagatataaattcatagcccatacgtacatgttcatcatctagaatactatgaacgtcaaagtgagctttaggagtcgtatcatccattacaggtttaatatgtttgtagaagaaaatagctgaggcttcaactactaaatggactaaaacaactttttctaattcagttgctgttgtcattttataagcaaaccatgaacttgcggcttcaagaactggatcaaatacaggttcaaaatctacacggttatttttgagagcacgattatgtccgagttcttcttctagatgggacattgtaatctcttcaaaaacagcgttgtgtaatgttgcagcacgagttaacaccattttctgaaaatggtcagaccaaacttggaaacaatcgagaaatcttttctttgcttgtgttttttttaatagtccacgatttactaaggcaaaaagtttatgtttatcgaaacgttccatataaatctcattacgagaaaataattgttccgcaattgtagtagctaaatttttattaacttgctcaggaaggaaagttgcccaagggtcagtaaaatcctcgtaaaggccacgagaatcgaattgaatggataatccccagaaaccatcgggataaccacctttgaaaccgtggagatgaccaggtggaactaaaagcgcatcacctgcttccatagctgtttgtatatcccctgttgattcagcagaaccttcacagagcaaaatcattgattctactggatgaatatgtggtactaattcttcaccagcttcaagacgaacccatgccatggatatacggttatcatctggtaaaaaatcgctcaattggttgtttttcatgaaatcttttacgtgtcctaaccaatgttccacaccattcacttcaatagtgcgaatcgatggaatatgatctcgttttactaatgtgactttagatagttttttcatttttcattctcgataattgtcaaggcgagagcatgaatgcttgtttattatccaaaaattaggttcacatttttataaaaaacttagtttaaaaatagctcagaataaaatgtcatttcaaaaaaataaatgatcattatatctacactgcttaattataattatactttactataagttaggtgataattcccccaccttgcaataacagttttttatatttttaacgcccaaattaagagtagttaaataaattttaattgttaaccattttatggtaaaaaatatttatttttttgacactagtcacatttgtcatcaaatgaaaattaatcacttgtttttcacaatactattttcaccactattttttatgtttcttactattaactttgaattatagtttacgtaatttattttataaattaataaaaaaataaaataatttcattaatttatttttgaaatttaatgaatatttatatccaatggatttcaagatggatcgcgacggcaagggagagaatccccgggagcatagataactatatgactggggaatagtgtaggccttcccaatcagcgcctagtcccgacacaggcgcattattgacaatacatcctttgcttttcagcaaataaggcaaagcaaaatagctactcggaggaaaacagcgtaaatacttcccccatactccaccagatttgactgtgggaaatggcgttatgtaatcgctatcatcatttcctatggataacaaacaggcccctgatgatatttcagcaattaggataatcatcgtgtagtgaaaaaataatatctgttgaaataacaacattgccgctgaaagaagctaacaaaaaatatgtccattgtcagcaatataaccaaaacagaattgtgttacctctacctgatagaacacctttatgtcccatcactacaactcaggtatctggaaaattagccttattaacctcaataccttccatgacttaatttttcattacgtgacttactactatttcgatattagcacactaaatgtccacatcagataacaggggttgacatctgttaacacagttgttccagcccgattaatttcttctctgactaaaactgtgattaataattttgatgatgaaatatacagacacatcgatagcaacagaatatccgaattaataataagacaaaaatgaatcaatttgtctaatttatataatgatgaaaaataagacattaaatacacatcattattatttcttgattgaattaactcaatcaatcgattaatttaatcttataacacaatgaaataaaaagaaatttttattaattgtaaaaaaaatacaatttttttgttgaagttgttgaaaaagatcatattttagttaatactattttccgtcgagtgagaataaaactaaagcaaaaacgaaactctgaattggaattcaacttaaaatccgaagaaaaataagaagaaattttcgttatcttaatcgcggttaagatggcaatttacccgatcgtattaatatcgttaatacgatggcattatatattacgatttgcccaatcagaatattcactttctttgagtaagatactagtgtgttgagtagctatagattactattgttaatatcgttattgaatctccatttcaataaaaatagtgaagataagtttatccatatgtgatatacactttacctataagagtttttcactgttattagcagtactttacaagaattttgctatcaatatggtacttatcatgctatagcattacaagcatttaaatagaaataagaatcattattaacaacacgaataagcttacaataatagatgatatctcagagaaaaaaccattcttttctatatcaaaaatcaatatcagaaatttattatcaacaatatgaatataaatacacagactataacatggtgagaaacaatgactaaattaggataaactaaagatatatgaaaaaaatggttaaatatgcgattgcattctataccctatggatttcaagttgcatcgcgacggcaagggaacgaatccccgggagcatagataacgatgtgaccggggtgagtgagtgcagccaacaaagaggcagcttgaaagatgacgggtatataccatgataaaaatgacttcaatgatattatcaaccattaaactatcctaatggtcagatatatatctttattgtatagacaagactaaaaaacatatttattaaggtaaggtatttttaaatgaaaaagaattttattttggcttctttagtgacggtattagcagttttcagtagtttcagtgcgttatcttatgatggaacaattaaattccgaggtacgattattaatgaagggtgtacgataactaccaaagatgttgcagtagacttcggtaagttgtcaaaaaacgcatttggaggaaaggcaaatatagttggtataagtaaagatttttctatctccttaacatcctgtgatgtgacaggagctctaggtatctcatttgacggcggacctgacgctgataataaaaatgtttacagttcaggacttgccggcgtaggtattcaaatactcaaaggaagtgatggaaacaacatagcaccaggaacaaatgtccctgggattgcaacaattgcaagtaacaccgccactatgaatttcagagcaggactaatttcaacaaaaaataatgtttcgattggctctatagataaaactttcaatttcacaatcatatatccataatcatcgaataaacatctttaatataattaaacatttttataaccaaaggagtaaaaatgcttcgctttattactccctttttgcttgtcttttttatgggacaagtacaagcagggattactttaggcggaactcgcctgatctataatggctcacaaaaagaagccacgatttctattaccaactcggatacagaaagaccttatcttgtacagtcgtgggtagataatatcgataacaatcaaaataaagtaccgttcgttattactccaccattgtttaagatgtcgaaagagagcgaacaccagatccgtgcttcatatatcggcaatcatctgcctgtggatcgggaatcgatatttttacttaatgtcaatgcgatcccggccgttgaaaaaaatgacaatagcaagatgatcatcacgataaaaaatattatcaaattgatttatcgtccatccgggttatctgataacgaggctaatgatgccattaatcgtttggcagcatcacgtaatgcccatggtgttcaattaactaaccccacagcttattacgttaatcttaatgagatgaaaattaacggaacattaatacctaaacccggatttattcccccttttagtcataaggtattttcaaccaaaaatgacataaaaagcgtaactctgactgctatcaacgattacggtggcacaacagaagagcgccagtttaatttctgataatattgtctgatgagtgtattgtgaaaaaaataattagctttgctttaatgatttgttgtttatcgttgccagcatatgcagagctgtatttcgatatcaatgcattacaattatcagacgaagacagagaaaatattaatctggagagtctggcaaaaacggacgcccatattccaggtatctataaagttaacgttatcgtcaataaaagggatattggcattaaaagcctgtcctttattgactgtggtgagaaactttgtcctgaattatctatccgtttactgaaagaaatcggggtaaaaatagcaagcttcccagaattagcatcccttgctgaacaagagatcatttctcaacctgagaaatatattaaacaagcgtcagcagagctggatctaagtgctctgacgctgatgctaaattttccgcaagctgccatgcaatcgcaaatcaggggcgatatctctcctgagcagtgggatgatggtttgccgatgtttttcaccaattatcatttaacaggaatgcaatcttggaataaaaatcaaagtgaacagaatcaatatctgaatttacgtagtggctttaatttaggtccgtggcgaattcgtcataatagttactacaaccatacgggtacaacatctgaatggcaatcgcttaaagcctatgctgaacgggatattcgcccattaagatctcgtctggtattgggtgaaacatccaccgatagcatggtattcgatagtttcacttttaatggcattaaattgatgtcggatagccaaatgttgccagatagccagcaagggtttgcgcctgttgtccgcggtattgctatgactcacgcaagagtagaagtgcaccaaaaagataatattatttatcagacttttgttccaccaggcgcgtttgaaattactgatatttaccccagtaacctgaatggtgatctggaaatatctatttatgaagaaaatggcaatatcagaaaatttactcagccctttgctgcctcaccattaatgatccgtgccggccaaatgaaatattttgctaatatcggtaaattcagcggtggtaaacaggccagtaaaaaaagatttattcaaacagaagctatttatgggttatgggatagcaccaccatttatggtggagtgattatttcctctgactatcaaagccatgcattaggtttagggcataatctgggaaaaattggtgcggtatcaatcgatgtcaccaatgcagcaacccatttcccaaacggagaaaagaaaagcgggcaatcttatcagatacgctacagtaaaggttttactgaaactaatacaacggtgacattagccggttatcgctacaataccaatggttattacagctttagcgatgccaataataactattccaataataacgacccatttgctgatcatagcagaaatagtgcgcctaaaaaccggatgcaaataacgatgggccaaaatttaggacaatatggtaatctttcattatcggcctggcagcaagattattggcaagataaaacccgtaagaatcagtcatattctatgtcctataacactaatattcatgatatctctttatcattaagctacaattatcatcgtaatcgctcaagtattaataatgatcaagttttttcattcaatatcagtattcctctggataaatggctgccatcagataatcacagcgcatcggtagattatgataccgcttataacaccaacggtagcagccagcattcaatgacattatccggctcgttactggaacaacaaaatctgaactatatgatttctcaggattacagctacgaaaaatcagagaaagaaaaacaatcaggtaatgccgccagtctatattaccgaggctcatatggttcaattaatgtaggttataccaccgatcatagaaaaaatcagcgagttaattatggattagagggagctattattgcccatccctatggcgttactctggcacaaaatattagcgaaagcggtgccagcgccttaattcgtgcccccggggcaaccaatgccaaggtactgaataatacctctatcagtacagattggcggggatataccattgtgccttatatatcgcaatatcgggaaaatatgttatcccttgataccaatacattcggtgatgacgtagatattgataacccaaccactaaggtcattccaaccaaaggagctttggtcttagcggattattctattcgtgttggtcatcgagtatttttaactttacaacatcacggtaagaaactcccattcggcacgataattacaggcccagataatgtcaatggcatggtgaatgaaaaaggcgaagttttcctcagtggtgtgagcgacacagcaaaattaaccgctgatttaggcgagaaacaaagttgtcatattaaattcgatagtaaattatatcaaaaaattaatggtattattctgacttcattacgctgtcagtaattaaattaatatttacctaggaaaagcatgagaaataaattaattattttagcaacgttattactaacattactcaatattacaaaatcaattgccacatgtaaattaagcaagaattttaaatcaattgatttaaatgttgagataaatgaaattatcaattcacctaataaccataaagcacatattcttatcgcgcaatatggaccaatggaactagctagcaaaataggtattaaagccgatgcagctattgctaattgcgatagtaatgcaacagttctctttaaaacagcaccaaataaaatagcacctgctaataatcctaacaatagcggcttgataaaaacaagtgcgaataatatatctttttacgtaaaataccttggaagtggaaaaagtaatcctaaaaataagaaattaagtttaaaagatataggtgaagtacaggtgtacctttaccaacatggagatttaacaccaaaagataaattaaaaaaaggattaatttcatctttatctacatatgatgataaagagttaataagaatcaaatataaaaaagaaaatgtcattaaaaataccggttgtatgacatcaacaccataccggaaactggttttaggcagccataaaatttctgattttaatgggaaatggcaagcagcacgtaaatcgtctccctttaatatatcgattgaatgcaaaggtaatattcttcctaccatagttttttcaggagaaaccattgcagaagtacctgacaaagataaggatagtgttattagattaaacaaatacggttcaggaaaagaagctaaaggcgttggtgttcaaatgatccataaaggaatacctgttgctatgcaaaaaccgattacagtcacgccttccggtaggatcggggtttattctattccccttttcgctcattactatcaaactgatgataccataacaggtggaaccgctaatgcattagtgcaatttacaattaaatacaaatagctttacaaaccatccaatttgacttaaattactaacatcacgataacatgagaaaaaagagaaattttcctcagtggtgttaataatacagcagaattaaaacctgacttagacgataaatagatctgccatattaattccactgataacttataccgaaaagatagtggtgccgcgccactctcacttcattactttattaatataccctatggatttcaagatgcatcgcggcggcaagggagcgaatccccgggagcatagataactatgtgaccggggtgagtgagtgcagccaacaaagaagcaacttgaaagatgacgggtataaatagtgttattaataagtgatgttattaataattcatgttgtcagcaattaagaataaatctcaataggcatagatatgaaatattatttacggttattaatttctgctgttttacttttcaatatcaataaaatacatgctgcttgtatttcagaatccacaacgggtaacggcactgtatattttgatttaaattcacttaaattaaacttaaacacatcaaatactaaaagtattcatgttgtcagattcagtgctgaacaattagctagcagcatggggctcaatataaatgatcctattttttcatgtgatgacaacggatatttggtttttggtgaaagtgtttatcccagcatggccggtaacacggagcatgggacaggaaagttaacaacaggtatagataacctctatttatattttgttgctgctactggaaatctaaataatatgaaatatcccacaattgatggtagaagttatatctattacccgccagaaaagaaaaaaattacctggaaagatatcggtgatattgatgtttatctctataaagagggtgaaattaaatcaggaaaatcattacacgctggaataatttccctattacaaacatcgaacggcatccgtctaataacaataagaaacaaaacaagatatcatgttactgctcaaggttgcatggcgctatctggcgatcaaaccgttagatttcatgatgtttacagctcttcgtttaaaggaaaaggaacaactgccggccatgctgattttaatatcaacattgaatgtacagaaagaatcaaacctacaattacattttccgcaagaacaatcagtgatgccccagagagtattattcaattaaacagaactaatgcaacaaatacagccaaaggggttggtgtgcaaattttatatatgggaacgcccgttcctattgggaaaccatttgctgtaggctattctgacaggaattctcgttataatttacctttcaccgcccgttattatcaaaccgatgatagaataacaggtggaaaagctaacgcaatagcacattttaccgttcaatatgagtgatattcagtataaactgggcagcatttccttatctggataattaacatggaacagacagttatacacaccaatcaagcatcactgccagaatatgacaacggatttatcactcaaatcgagtatggaacggttgttaaacaccctcaagtacatttctggcatgcccgctttgatctttcttattatcacgatgaactcttcgaacagttaaatctccccttccctgctaccttaactaaagccgtcaagaaacggcgggctgaatatctggcagcacgttattgtgccagacaacttttagcacaattaggacaaccagcatttaatttgatctctggtcatgatcgcgcgccaatctggccgcagaatatttgtggttctgtttctcattcatctcattgtgcaattgtgctggctgcaccgcaaactcataaccgattaattggtgttgatatagaagctatcgtcgatcgtcaaaatatagatgaaatcacaaaaatgattgtgaatgacaaggaaattcaacttctgaaacattgccatttaccacttgaacaagcatttacccttgccttttctgtaaaagagagtttgtataaagcactctatccacaagtaaaacggttctttggctttgaagcggctgaaattattgccctatccctggaaaataatgaaataacattagcgctgcgggaaacactcacccctcattatccggcaggtacactatttcgtgggcaatttattatctacccacaggaaatattaacgctaattattcaataaccaaaatcgataattgctgattctgctcagcaatttcacgattattcattaccatcgttttcaataaaaatgctatttatttaatatcctttcctgtatttatcagtgagttcttaccaacagcaattaattcctccaacaatactgaaagctgaaccatcttctccggcgaaaaggctttttcaatcgcctgatatccctgttccacctgctctttcgccttttcataaagtttctgaccatcctgcgtcaaagaaacataaagtttgcgctggtcattcatcggtttaagacgaaagatcaagccatcacgttccatgcgagtcaatatcccggtcagacttggacgaagaatacaggtctggcaggataaatcataaaaatcaatcgaccgattatcagacagtacacggataatacgccactgctgttcagtcaaattatgacgtttaaggattgggcgaaaaaaacccatcgcggtttctcgcgcttgaagtaatgcaattgtcagagattcatgcatgggtaatgaaggctcttattttagttaatcactgatttactctctgttgaaagtactatctcactctataaccacaataaaaaagactagcacgtccctcagtcaaccacaaagaaaaaatcataaaaatattaataagtaaacaaaaattaaccctaaaaataaagttaataaaaagttaatgcaagagtaacgcctttatccgaaaaaagattaatatcttgattaataatgataaaaaacaaatttagtggagatattgttactgagatcacaattaaaattaacaaacacattaacatattgcaacaacgcgccccgtagcttattaatatattaataaatgcatcttaaaaccgcccgtttaagtttatgaggaatcgttaatgaaaggcactgtcttcgccgtagccctcaaccaccagagccaggtagatttctggcatggctcatttcagcaaacaccttataacactctgcctaaaacaccagtatggttcattaaaccccgcaataccgttatcacctccggtgaagcaattccccacccggtaggtgaagaggttcaaagcggtgcaacgctggcattaataataggtaaaaccgcccgcaaagttgccattgaaaatgcggccgaatatatcgcaggttatgcattagctaatgaagtcagcctgcctgaaaccgctttctatcgtccggcaataaaagctaagtgtcgcgatggtttttgccccataggccagatgactcatcctgaatccattgatgcgttagatatcattaccgaaatcaatggtcaggaagtcgatcgctggtcaacagccgatctggtgcgttcagccacggaattagttgcagcattgagtgatttcgcaaccctcaaagagggggacgtgatcctgcttggaacgccacaccaacgcgtggctatcaaaccgggcgacaaagttgttattcgggcagcaggttttccatcactggaaaatcaggttgtgcaagtgggagaaaaagcatgaaacacgcaagagttcactatcaaggtcgcgatttgattgttactgtcgatgaacaggaaaatgtctgcctgcctgatggcagtaaaatcaacagcgaatccgttcaatggctgccacccgcaaacggtaccctgtttgccctcggtttaaattatgctgatcacgccactgagctggaatttaagccccccgaagaacctctggtttttatcaaggccgccaatacgctaaccggtcatcgtcaggtttccgttcgccctgatcatgtggaatatatgcattatgaagccgagctggtggttatcatcggcaaaaccgcccacaaagtgactcaagaacacgcgatggattacgttgccgggtacaccgtctgtaacgattacgcaatccgtgactatctggaaaactactatcgtcctaatctccgggtaaaaagccgcgatacactgacccccatcggtccgtggttcgtcgataaagaagatgtccccgatccgcataatctgacattaagcacttgggttaacggtgaattgcgtcaacgcggtacaaccgctgatctgatcttcaatattccatttttgatcgcttatctaagcgacttcatgacgctgcaaccgggagacatgatcgccaccggcacgccaaaaggattatccgatgtggtaccgggagatgaagttattgttgaagttgaaggtgttgggcgtctggttaaccgtattgtcagccagcaagagtatgaggagagtctgtaatgaccgtcattagccattggatcaacggcaaaaacatcagcagtaaaacctattttgaaaccacaaacccggctaccggcgaagtgctggccgaagtcgcttccggcggtcaagaagaggttgatcaagccgttgccgccgcaaaggcagcctttcccaaatgggctgatctgccgatgaaagagcgtgcacgcttgatgcgccgtttgggtgaattgatcgatgagaatgtgcctgaaatcgcggcaatggaaaccaaagataccggtctgcccattcatcagacacaaaatgtcttgatccctcgcgcttctcacaatttcaacttctttgctgagatttgtcagcaaatgaacggccgtacctatcccgttgatgacaagatgctcaactacaccttggtgcaacccgtcggtgtttgtgcactgatttctccgtggaacgtgccatttatgaccgccacctggaaagttgccccctgtttagcactaggtaacaccgcagtgctgaaaatgtcagagctctccccattaaccgccaaccgtttaggcgaattggcactagaagcgggtatccctgcgggtgtgctgaatgtggttcagggatatggtgctaccgcgggtgacgcgctggtgaaacatcacgatgtacgcgcggtttcgtttaccggcggcacagcaaccggtcgtcagattatgaaaaatgccggcctgaaaaaatattcaatggagctagggggtaaatctccggttctgatcttcgaagatgcggatattgagcgcgcactggatgccgcgctgttcaccattttctctatcaatggtgaacgttgtaccgccggttcacgcattttcattcagcaaagtatctaccctgagtttattaagcgttttgctgaacgcgctaatcgtttgcgggtgggtgatccacaagatccaactacccagatcggtgcacttatcagcaagccgcattgggagaaagtctccggttacatccgtctgggaatagaggaaggtgcaacgctgctggcaggtggaccagacaaaccgattgatttaccggcacacctaaaagacggccatttcctgcgcccaacggtgctggcggatgttgataaccgtatgcgggttgctcaggaggagatcttcggccctgtcgcctgcctgctgccattcaaagatgaagcagaaggtctgcgcctggcaaatgacgtggagtacggtctggcttcttacctctggacgcaggatgtcagcaaagtcttgcggctggcccgcaatattgaagccggcatggtatttgtcaacacccagaacgtccgtgacctgcgtcaaccattcggcggcgtgaaagcctccggcaccggccgtgaaggcggtgaatacagttttgaagtgtttgctgagatgaaaaacgtctgtatctcgatgggggatcatccaatcccacgttggggggtataaccgttccgtcagcgttaaccacggcgaattccggttcgccgtcctgatatcaaatgaggattttatgggtaagttagcgttagcagccaaaattacacatgtgccatccatgtatctgtctgaactaccggggaagcatcacggttgccgtcagggagctattgatggtcacaaagagatcagtcgccgttgtcgcgaaatgggtgtcgataccattattgtgtttgatacgcactggctggtgaatagtgcctatcacatcaattgtgccgaccatttctccggcatttacaccagtaatgaattaccccacttcatccgggatatgagttatgaatatgacggtaaccctgaattgggacaaatgatcgcagaagaggcacgcaatgtcggcgtgcgtgctcaggcgcatgaaatcccaagcctgaaactggagtacggcacgctggtaccgatgcgttacatgaacagtgaccgacattttaaagttatctcagtctccgcattctgcactgtccatgcttttgaagatagccgtcgtcttggagaggcaattctgacagcgattgagaaatatgatggcaccgttgcggtattcgccagcggttccctttctcaccgttttattgatgatcaacgcgccgaagagggcatgaatagctacacccgagaatttgatgaacagatggatcatcgggtggttcaactttggaaagagggcaaattcaaagagttctgcaagatgctgccggaatatgcagattattgttatggcgaaggcaatatgcacgacacggtgatgttattaggtctactcggttgggataaatatgacggtaaagtggaatttctgactgaactgtttgccagttccggcaccggacaagtcaacgccgtatttccactacctgattacatcaccgataaacccgcgatcccctgatgaggagcaacctatgccacatttttatgctgaatgtacggaaaatatccgcgaacaagccaatttgccggagttgtttgccaaagtgcatcaggcgctggcagataccggcatttttccattaggcggcatacgcagccgtgccatctggctggatacttggcaaatggccgatggtcaacatgattacgccttcgtccatatgacactaaaaatcggtgcaggacgcagccttgaaagccgtcaacaggttggtgagatactgtttcctctgatcaaacaacattttgcctcgctgatggcacaacgttaccttgccctctcttttacgatggaagaattagacccggtattgaactacaaacaaaacaacgtccacgccttgtttcgtaaggagtagtgatgccgaagccctttcatcagcatcctcctcgttggttaatccctttattaggtgcgctagtggccttcgggccgctgtcgattgatatgtacctgccagccttgccggaaatggcaaggcaattacaggcaacacaagggcagatgcaacatactttaggcgcatttttcgccggtttctgtattggcatgctgttatacggcccactgagcgaccatttagggcgcagaaaactgctgctcagcggtatcgcattattcgtcgttgccagtgcgttgtgtaccttggtgacacaagttgaacaactgattttactgcgcgcattacaggcatttggcagcggtgccgcggtggtcatgggccgagcgatcgcccgtgatatctacggcccgcaggaattaccacgcgtgctatcactcatgactttggtgaccatgatagcgccgcttatcgcgccattactgggtggcttactgttaacttatttcaattggcaggccatatttacgctattgggcctgttcggttgtatcagtggaatattattactatttttcttgccagaaacgctacccgcccagcataacggcggaaaacttatcactgcgtttaaaaattacggcaagttactgactgacggtgaagctatggcaactatcggcacattggcattcacttgtgccgccatgttcgcatttatcagtggttcccctttcgtctatatcaactattttcaggttccggcgaattactacggcttactgttcgcctgtaatgcgctaggcatgatggcagtagtgctgctcaatgtccgtttactaaaagtctacgatgtttcccgtctgttatttatccaaaccagtgctcaattactgttcggcatcttattggttatcttttatcagcaaagtctgacggtgatcgtcattttggtcgtactgtttatctcgctggttaatgccattggtactaacagcctctctttattacttcaacatcgcggtcaacttgccggcagcgccagtgcgctcgctatttccgcacaatttgctatggcggcattcgccagtgttgccgtctctttactacaagatgaaaccccttttgctatggcccttgtaatgactgtttgtgctggattgagttggttatgccagcagctagccactttctaccggcgaaaacccctcacacaagtgtctttaggagaaaaaaatcatgacaaataatgtaaataccgaattactgcgtcaacaagcttatatcaacgggcagtgggttgatgccgacaatcaagcaacttttaaggtgactaacccagcaaatggtgaagtgattgcccacgtcagtaatatgggtgcggccgaaacagaacgcgcaattgcagccgctcaacaagccctaccagcctggagaaccatgacagccaaacaacgcagccagattctgcaacgttggtttcagttaatgatggcaaatcaaccggcactggctgaattgttgagccgggagcaagggaagtcacagacagaagcgatgggcgaaatcgcttatggtgccagcttcatcgagtggtttgcggaagagggtaaacgcacctacggtgaaaccattccaagcccattgcctggtcgccggattgtcacgatcaaacaacctattggcgttgtggcggccatcacaccgtggaacttccccaatgccatgatcacccgcaaggttggccctgctctggcagcaggctgcacggtgatcctaaaacccgcctcggaaaccccactttccgctctggctctggctgcgctagcggaacaagccggtattcccgctggcgtattcaatgtggtgaccggcatcgatgcgaaagccatcggcggagctatgacccaaagcccgattgttcgcaaactctcttttactggctcaacccgtgtcggtaagctcttgatggcacaaagtgccgacaccgtgaaaaagctatcattggaattgggtggcaatgcgccatttatcgtttttgatgatgctaatattgatgccgctgtacagggagcattgatagctaaattccgcaacagcggtcaaacctgtgtttgcgctaaccgaattttggtacaggaaaccatttatgacaccttcgccgaacgtctggcacaagccgttaatcagttgcaggttggcccggctagcgacgctaaatcacaacaaggccccctgatcaatcaagccgccgtcgataaagtcgaggaacacatcagtgacgccatttcccacggtgcacgcatattggccgggggtaaaccacacgctctgggcggtctgttcttcgaacctaccgtactggctgatgtcaataaatccatgcttatctcccaagaagaaacattcggccctattgctcccctgttcaaattccgtgatgaagcagaagccatccatctggcaaatgagactgaatttggtctagccgcttatttttattcccgcgatatcggccggatctaccgtgtggcagaagcgctggaaagcggtatggtcgggatcaatgaaggtttaatctctaatgaagccgccccattcggcggcattaaacaatcgggcctgggacgtgaaggttctcgttacggtatcgaagattatctggaagtgaaatatctctgctttggtggcatagaagacacaggagtttaaccgcatgttacagaaagaagtcgtatcacaggttgcacatcgtctgcatcaggcagaaaaaagccgtgaacaaatacgccagatctcattggattaccctgaaatcaccatcgatgatgcttatgctattcagcgtcactgggtggagttgaaaattgccgaaggtcgggtactcaaaggccataaaattggcctgacctcaaaagccatgcaagccagctcacaaatcagtgagccagattatggcgctttgctggacgatatgtttttccctgatggcagtgatattccatgtgatcgctttattgtgccccgtattgaggtcgagctagcattcattctggcaaaacctttgtgtggcccgaactgcacactgtttgatgtttacaacgcgaccgattacatcattccagcgttggaattgatcgacgcccgttgccataacatcgatccggaaactaagcgcccacgcaaagtgttcgatacgatttctgacaatgccgccaacggcggcgtcattatgggcggccgtccgattaagcccgatcagtttgatctgcgctggatcagcgccctgctctatcgcaatggcgtgattgaagaatccggtgtcgcggcggcggtacttaatcatccagctaacggtgtcgcatggttggcaaacaaactggccccacatggtgttcagcttgaggcaggacaaatcattctcagcggctcttttacccgcccggttccagccaataaaggggataccttccatgtggattatggccccctcggtgctatcagttgccgttttgtttaacgaggaaaaatatggatcggttaaccaataaatttaaacaggcattaaaagcaggccagccacaaatcggtctatggttggggctttgtaacccctacagtgctgaattagtggccggagccggtttcgactggctacttattgatggcgaacatgcaccgaacgatattcagacgattctaagccagttgcaagctatcgccccttatccaagtcatcccattgtgcgtccgccctggaatgatctggtcatcattaaacaactactggatatcggtgcccaaacgttattaatccccatgatacaaaacgccgaacaggcttacgaagcggttcgggcaacccgttatccaccggcgggtatccgtggtgtgggtagcgctctggcaagagcttcccactggaacagaattcctgattatctgcatcgtgccaacgatgaaatctgcgttctggttcaggtagaaacccgtgaagcactccgtaacctgccggagatcctcaaagtagacggtgtggatggtgcctttatcggtccggcggatctcagttccgatatgggctttaccaataatccgcaacatcctgaagtgaaagacgcaattgagcaagccatcgctcaaatcaaagcggcgggtaaagcgccgggcattctgatgtccgcacccaatgttgccgagcactacctgaaactcggtgctctattcgttgctgtgggtattgatacaactttattggctcggacagcggaagcgctggcagcacgatttatcgcggataaagagccgccggtagcacctttatccggtgtttattaatctcagcaaccacaatttaataattgatttactcaacaagcatttaatttcctagacaacgtaatacacataaaacagtaagtaaggaaaatgataatgagcgattcatcaactgttgtgcaacagccggatcttccggttggtcaacataaaccgctgacggcacaacagcaatccgtcattaataagctattccgtcgcctgattattttcctgttcgtcttatttgtattttcgtttctggatcgaattaatatcgggtttgccggcctgacaatgggtaaagatcttggactgaacgcaaccatgttcggtctggcggcaacgctgttctatgtcacttatgtcattttcggtattcctagcaacattatgctaagcattgtcggagcgcgacgctggatagccacgattatggtgctctgggggatctcctccactgccaccatgttcgctaccggaccaaccagtctgtatatcttgcggatgctggtcggtatcgccgaagcaggtttcgtgccgggcatcctgttatatctgacttattggttcccggcttactatcgcgcccgtgccaacgcactgtttatggtggcaatgccggtgacgatggcgtttggttctctggcttccggttatattctggaaatggatggcctcatgaaccttcacggctggcaatggttattcctgctggaaggttttccttcggtactactgggaattgtcgtttggttctatcttgatgattcacccaaacgcgctaactggctgacagatgaggacaaaaaatgcttacaagagatgatggataacgaccagcccgctctggttcaaccagcaagctcatcaactcatcaggcaatgcaaaaacccagtatatggcgtgaaattttcgcgccgatcatgctgatgtataccctggcttacttctgtttaaccaataccttgagtgcgattaatatctggacgccacagattgtgcaaagcttcaatcagggcagcagtaacatcatgatcggtatcctgaccgctattcctcagttttgtaccatcatcggcatgatttactggagtcgccgttcagaccggttacaagaacgtaaaatgcatacagctctaccctatctgttcgccgccgtgggctggatattgacctcattgaccaaccacagtgtcattcagctcattgggattattatggcttcaaccggttcatttaccgcaatggcggtcttctggacaacgccggatcaagctatcagtttacgtgcaagagcgatcggcattgcggttattagcgctacaggcaacataggttcagcactcagcccgttattaatcggctggctgaaagatcagacaggaagctttaataccgggctctatttcgttgccggattgctggtcgttggcgcagccattatctggttgatcccaatgaaacacgccagacagagaacagcgccgtaattttcaataaaaaggaaaaaccatcatgactgagcctatcattgccaatattgatatcagcaaggattatgatgaaacccaaggcactgatgatgtgcactatcaaacctttggtcggatggcagcattttttggtcgtaatatgcaagctcatcgtcacgatggtttcttccaacttcattttttgatcaccggccatattgaattacagttagatgctcaacactattctgtacaggcaccgctgtttatcctgacaccgccctccgttcctcacgcttttttcactcaagatgacagtgacggatatgtccttaccgtacggcaagatctgatattaccgttattggaatcactctatccagctaataaagatattcttgatattccggctatttgcttatccgtcgtcgataaaccggaagaattggccgcttttaatcactattgggcgttaatcgcccgcgaatcatcgaataactttattggtcgagagcaatcgctgacatttttagcacaagccatatttacccagttattgcgcaatattcctcttgatgatcacccggttaatggcgtgcgaggagaaattaaattgtttcagcgctttaatcaattaatagacaatcattatcatcatcatctttccgtaccggaatatgctcataagttagatattacagaatcgcggttaaaagatatgtgccgtcggtttaccaatcgtccaccaaaacgactcatcttcgatcgtcaactgcgtgaagccaaacggctattattattcagtgattgcccagtatttgaagttgcttatcagcttggatttaaagatcccgcctattttgcccgcttctttaatcgattagttggctgctcacctagttattggcgagaaagaaatattcacgaaaaataaatatccctgctaattataccaagcccggcattttattctgcctgttcagcaaacctcgtgctattaattcgtgctaaactgactcagttttattacaaaatctcttccaagaattaaaattctgaatatactgagactctgtaactcactggaacttttgaaggataaatgatggcaaccggagtgccgataaaaatataccctatggatttcaagatgcatcgcggcggcaagggagtgaatccccgggagcatagataactatgtgaccggggtgagcaagtgcagccaacaaagaggcaacttgaaggataacgggtataaatttatttaagaaaaggaaacacagcatatgcaaaatccttactatatggcaggtaaattcgggttcccaccttttgatgtcatagacttcatataatcatgagaatttcagaatgagcaaatcagctatagttttaaatatcacttatgctatcttttgtgcgttatttatatatatgatgtcatacttagaagaagagcattatatcggtggtcaggatatagataatctctgtactgtttacagagagctgatagatgataatcgtgatgtatttgctccaacatgtttactgattatgtcccccttaatttatgcaaccgtgaagaaaagattcaaatcactttctcttaatgtcattacatttgctttgctaggatactggatgtggcgattttttatcagattaatcgtatgcgtttaggatagtttcaaattattcgggtagcggccactgggtgttacctgaatgtcaactcacgctatgcgattattactaatacgataccttaacagttcagatttttacgttgctcttaatactttgataccctatttctaagcattttggttttatcaaattattcctcttacaaatgtaaattatcttaaatttataaatttttgattgctttttgcacacaccctacagcaggataaaaaaagcacattagaggaacaaccagtatggcaaatatcatttacttaacattgaaaggcaaaaaacaggggctaatctccgctggctgcggctccttaaactccataggaaataattaccagcacggtcatgagaatgaaatttttatttactcgcttcaacatttaatgacaagggaacaacacgtatcccatcatccggagaaggaaccactgcacctattgaatacatttcaagtacctctattggttttggtgttactaaaggatctaaatatgtagaaaagttatataaagtcagggttgttctaaggtattctgaatacaatggtaaaccattttatatattaacagcatttccaaagggctaatttaatgaccggacaatatccatttctagatattttaatgcatgcttactttaatcaggacttcgatataatatcaggtcccgagcttgatgatgttatcaatgattttcttaatgacgcatctcagggaatgagaaaagggttaatagaagaaatcaacgaccttattgactcttctgaagatgtagagagcacatttgattatcattaccatgatgctgacgttctccccgaagggtggggtatgacagcacttgagtttttaacgcatgtgtcaaacaagtcacaagattatttaaacgagcatactgaacaagatgagtaattaaattattcttaaatgaagaaataaagaggttaaatataatggaaataagagaacaattgcagtacatagataagctgacaaatgctattgataggaatgattttgaatcatttcaaaaaatattcaatgagctgcaaggaaattatattaatattgcaccgccaatgttattggaaactatttccgccgtattagaacatctgaatcagtcatcaaaaataatgcaaagttatacccgtcatctttcaagttgcttctttgttggctgcactcactcaccccggtcacatagttatctatgctcccggggattcgctcccttgccgccgcgatgcatcttgaaatccatagggtatatataaacaaacaccataaaaaggataaataaatcaacctttaatccataaaatattcaaataaaaaacgcttttgaatgtaattaattatatattatactttaaaggagtcatttattaaccaaacttcaaaaacattaataacacacaaaaaaattcatttcaccctcaatgaaaacaaaaaaatatgatgttattaaagatattttaacctctgactaaaaataattataaaaataacaatgaaaacattacaaatatccccatgccatatgcaaaaatttgcttttcattcagtttttctttaataatactggttagtttgatatttgatttcttaatgtaaaactttaaatgagaatattatgcaaaaaattacattaattaccggcggatcacgtggcattggtcgcgcaacagctttttatctggcaaagaaaggacaccacatttgcattggctaccacaccaatcaagagcaagctcaggaagtcatagaaatcatccataatatcggcggtaaagctatcgccattcaggtcgatgtcgctgatgaaaaacaagttgtagaactcttccaaagaattgataccgaactcggatgcatcacaggtttggtaaataacgccggaatacttaaaccacaagcatcgattgaacaattaaccgctcatcgcttgcatgatatttttgccaccaatgtcataggcagttttctctgtgcacgggaagcggttaaaagaatgtccttccggcatggtggtcacggtggatcaattgtcaatgtttcatccgcagcatctcgactgggatcaccgcacgaatatatagattatgccgcatcaaaaggagcgatcgatactttgactattggcctgtctctggaagtggcagatcagggaattcgggtcaatgccgttcgtcctggattcatctataccgatatgcacgctgatggcggcgaaccaaatcgagttgatcgggtgaaaaattccttaccaatgaaacgcggtggacaaccgaaagaagtggcacaggctatcgtctggttgctgtcggatgaagcctcatatgtaaccggaaattttattgacctcgccggagggaaataacatttaaaacaagtaaatattgagctgaatttaccaataaccaatatttggatacatgaaaaagaaaccagaaaatgaaagatgccccatattttcaattgactttagatcaatattcaggatgtattattaattagtatgggctggcatattgataacaggactcatcgctattttctggataaagaatatgcccaagtgcccattcggttgaacgcaggccaaactgcaacaaccaaaatcctcaatacaaccaagaggtaaatcatgaaaaacattgatccaaaactttatcaacatacgcccacgattagcgtctacgataaccgtggcctgaccattcgtaacatcgactttcaccgctctgtcgcgggaggggatacggatactcgtattacccgccaccaatatgatgtccgaggacacttgagtcaaagcattgacccacgtctatatgacgccaaacagctcgacaactcaataaatcccaattttctctggcaacacaatctcaccggcgatactttgcgaacagaaagtgccgatgccggccgtaccgtcgcccttaatgatattgaaggccgtcaagtattaattgtaaccgcaaccaatgccattcagacccgacaatatgaagctaacaccctgcccggccgtctattgtccgtaagtgaacaagctgccggagaaaagatacccctcgttactgagcattttatttgggcaggtaatacacaaacggagaaagatcataaccttgccggccagtacgtacgccactacgacacagcaggagtgacgcaactgaaaagcctgtcattgacagaaaatatcttatctcaatctcgtcagttattggccgatggtcagcaagcagactggacaggtaacaatgaccccctctggcagaccaaactcagcagcgaaatttatacaacacaaagcacctttgatgctaccggcgctttgctaacccaaaccgatgcaaaaagcaacatacagcgtctggcttacaatgtagcaggtcagttaaaaggtagctggctgacattgaaaaaccaaagtgagcaagtcattatcaaatccctgacctattccgccgcaggccagaaactgcgtgaagaacacggtaatggcgctatcactgaataccgctatgaaccggaaaccctacgattgatcggtaccaccactcgccgtcaatcagataacaaggtgttacaagatctacgctatgaacatgatccggtcgggaacatcatcagtattcgtaatgatgcagaagccactcgcttctggcgcaatcagaaagtggtgccggagaatgtctatacttacgattccctgtatcagcttattagtgcaacaggacgagagatggctaatatcggccagcaaagcaaccagcgtccttctccgatccctcttcctactgataacaacacatataccaactatacccgcacttatgattacgaccgtggtggcaatctggctcaaattcggcacagttcacccgctagccaaaataactacaccacggatatcacagtctcgaatcgcagtaaccacgcagtgctgaattcactgacgactgatccgacacaggtagatacattgttcgatgctggcggccatcagaaaaaactactaccgggacaagatctgagctggaatgcacggggggaactgcaacaagtaacgccggtaaaccgggagaataccagtgatcgagaatggtatcgctacggcaacgacggcatgagacagttaaaagtcaatgaacagcagaccggtaacagcacacagcaacaacgagtgacttatcttcccggattagaactacgtacaacgcaaaatggcacaactacatcagaagatctgcatgttattaccgtaggtgccgccggtcacgcccaagtacgggttctgcactgggcaactacaccaccagccggtatcagcaataatcagctccgttatagctatgataatttgattggttccagtcaacttgaactggataacgaaggacaaattatcagtcaggaagagtattatccatttggcggtacagcgctgtgggcggcaagaaaccaaacagaagccagctataaaacccttcattactcaagcaaagagcgagatgctaccggactctactactacggctatcgctattatcagccgtgggtaggcaggtggttaagcgccgatccggcgggaactgtggatggtctgaatctgtaccggatggtgagaaataatccaattactttatatgataatgatggtttggcgcctccacgagtgagaccccgtcatcctgattcagagggggaatcagaaagcgaagacagtagcattggttatcgtgccttgagatctgatgagcatccctctatacatggccttcgtcctccagaaggagcaaatctaaatatttctgcttatgctcatgttagagcagggacaagtgcaaaggtcaaatccagttggatctcctatagtcgttctttgaaagttgcagcaagctgggcagcctcaagtggtagcggtagagttgttaaattccgaataaagaaaaataaccgatcttttgatctaacaaataaaagcgatcagattagaatgcttcaggaacaagctacttcatctcatagcgaaataaatcttgatcctaataaacacccagcaattaactttgctaaaggatctcaggagggacttgtttacggaaaagttgataaatcacaaattatcgctgaatatcaggctgaaaaaactacagaacctgaatattctgaatataagagcttgaaagaaaaaaatactcctgatgatacgtggaagttaataaaatcgcggacaacggttatgaaaaagattgatggagtaaaagttaaaaccacaccaaaacctgtattaataacagagacttacaacgagaatagttttttaaatcaagccagaggagaatgggatgaattacagaaaaaagcatcaccgttattaataggacatttagaaagtgaaggattatcaccatacgaaatggattatatttcaaataaatctgaatataaaaaatatcgtgaagatgttcgtaatagtattgctaaatatagaaacaacctacgtaactaaataatataaaagcttttgagtctgaacataatcccgttcaattattctcatctcactaatggtgaccgtccaaacggtcaccaaactcgataagaaatagatgcctcttagccacaaaaacatcgcctagatcacactttagtcacaaatcaccatttcccaacgaaaagtaccagcgaaccttccaaaaatctattcaagaaaagccgttctgaggattcaattaagaaacacaaaacaaacactaaattaacatttccgtgccaatattgattatattatatcaagacaggcgctttttatgacgactgtgaggtagatatgaaaccagaagattttcgcgccgacaaaaaacgtcctttcaccggtgaagagtacttgaaaagccttcaggatggccgcgaaatttacatttatggcgaacgcgtaaaagatgtcactacacatcccgcattccgcaattctgctgcttcaattggtcagttgtacgatgccctgcacgccccggaaacccatgataccctgtgctggaataccgataccggcagtggcgggtatactcacaaattcttccgctttgctaccagtgcggatgatctgcgccaacaacgtgatgcgattgctgagtggtcacgtcaaacctatggctggatgggccgtacacctgactataaagcggccttcggtaacgcactcggcgcattccctgaatattatggccagttcgctgataacgcccgtgtctggtacaaacgtattcaggaaacaggcgtttactttaaccatgccattatcaatccccccatcgatcgccataaacccatcgatcagacacgcgatgtctatattaagctagaaaaagagactgatgccggtatcatcgtcagcggcgcaaaagtggtagcaactaactcagcactgactcactataactttattggttttggctccgcacaaataatgggagataaccctgatttcgctttgatgtttgtcacgccaatggatgcggaaggcatgaaactgatctcccgcggctcctatgaattggtagcaggtgtaacaggttccccattcgattatcccttatccagccgtttcgatgaaaacgatgcgattctggtgatggataaggtccttattccttgggaaaatgtcctgatttaccgtgattttgaccgctcacgcaactgggcagttcaagcaggtttcgccaatctgttcccattacaggcttgtgtacgactagcagtgaaactggattttattactgccctgctacaaaggagcctggaatgtaccggcgtgatagaattccgtggtgttcaggctgacctgggtgaagtggttgcctggcgtaacctgttttggtcactgagtgatgcgatgtgggcagaagccaaaccgtggaaaggcggcgcttatatgccggatacccaagcaatacaaacttatcgcgttatggcaccaacggcttacactaaaattaagaatattattgaaagtaacgtcaccagcggcctaatttatctaccatctagtgtacgtgatatgaataatccagaaattgataaatatctggcccggtatgttcggggttccaacggaatcgatcacgttgagcgcattaagattttaaaactgatgtgggatgccattggtagtgaattcggtggccgtcacgagttgtacgaaatcaactacgccggaagtcaggatgaaattcgtatgcaatgtctgcgtcatgctcatggctctggcaatatgaaaaaaatgatggatatggttgatcgctgccttgctgattatgatcagcatggctggcggaggccacatttatacaacaataacgatattaaccagttagataagctgctgaaataatcggtagcaggaggccaatatgtccttagaaaatgaacatcgcctgcgtttcagagatgcgatggcgagtctgtcagcagcggtgaatatcgtcaccaccgatggtcatggcggatgctgcggcatcacggccaccgcagtatgctcaatcaccgatacgccacccacgctgatggtatgcattaaccgtagcagtgctatgaataccgtttttcaggaaaatggccgcctgtgtgtcaatattttaaaccacgaacaagaattgatggcacgtcactttgccggtatgaccggagtcagcatggaagagcgctttcgctggaatatctggcagaaaggaatattaggtcaaccggtgttaaccggcaccctcgccagccttgaaggtgaaattgaacaggttcaagaagtgggaacgcataacgtgtatctggttcagattaaacatatcacggtgagcgaacaaggccacggcctcatctattttaagcggaatttccgtccagttatgttggaaattgaaaccgctacagtttaactgcttctccatctggcagtgattgttcttccactattcaggccattcagggcctgaatagtgttctgttgtcaacgcatatatctatacccgtcatctttcaagttgcctctttgttggctgcactcgctcacctcggtcacatagtttgctatgctcccggggattcactcccttgccgtcgcgatccatcttgaaatccatagggtatattcaacttttttcctgatcatttttaatattcactttatgaatatagttctaaatttgatattaatttttatattagtgtgatcaaccaccaagaacacattttaaccatataataacctaccgagttcatgataatttggacaaagttcaaaaaaacaccacgttagcgatacatcatgttataaaaatgtcaactatcaggcattttcgtatgtattccaacatataaataatgactcatcagaggcaatcaactatgaataaacccgcatccatcggtttattacaacaacccaagccgttctttatgattttcttcgtcgagctttgggagcgattcggctactacggtgtacaaggcgttcttgctgtctattttgtacagaaattgggattttcccaagaacaagcgtttattaccttcggtgcatttgccgcgctggtttatggtttgatctcgattggcggttatgtaggtgaccacttactaggaactaaacgaaccattgtgttgggtgccattgtcctggcaattggctattttatgactggactttctatcctacaccctgatttaattttctacgcattgggaacgatcgccgttggtaacggcctgttcaaagccaacccggccagcctgctgtctaaatgctatccccccaaagatcctcgtctggatggggcttttacgctgttttacatgtcaatcaacctcggctcgctgttctcactcgctctcgcgcctgttattgcggaaaaatttagttatgccgttacctacaatatttgtggtattgggctgattattgctttgttagtctatattttatgtcgcaatacagtacgtaatattggttctgaacccgaccatcaaccaatcaactataaaaacctattcctggtattagcaggaagtgttgtgatggtttacgtctgtgcatggctgatgcacaacgtgaaaatagccaatattgtgctgattaccctatctgctatcgtggtgtttatcttcttccgtgaagcattaaaacaggataaagctagccgtaacaaaatgtttgtggctttcattttgatgcttcaagctattgtgttcttcatcctgtatgcacagatgccaacttctctcaatttctttgccatccataacgttcaccaccagttgcttggttttgacattaacccggtcagtttccaagcgcttaacccattctggatcgtcgttgccagcccgatactcgccgccttatacactcactggggcgctaaaggtaaagacctcacaatgccagctaagtttgctgttggtatgttcctgtgctctttaggtttcctcactgccgccgctgccggtttgtggtttgcagatgaacaaggtttgacctccccttggtttattgttctggtttatctgttccaaggtgtcggtgaattgatgatcagtgcattgggcctggcaatgattgcagcccttgttcctcagtacctgatgggttttattctgggaatgtggtatttaactcaagcaacttcctccttactcggcggctatgtcgcagcccttaccgccgcaccgaaagggattactgacccattgcaaacattgccaatctataccagcgtattcggcaaaattgggattgctaccttcattgtcgcgatcatcatggcggtcaccgtgccgtggctaaacagtatgatgaatgaaaaacaaaaaatatgacttgagctaaaataaaaaacctcgccaaaggagaaaataccgctcgctcaccccggtcacatagttatctatgctcccggggattcgctcccttgccgtcgcgatgcatcttgaaatccatagggtatagagcatctagaatttagtcgctttgaacatggcaaaaggtgggtaacatcgtagatctccagtatcctctaaagcatccgcgtcattgtgttcaaaaagctcaatagttttgaacccggcctcgttcaagatttggtaatatgtatctttatgccaatgcgtatctgaaatcttaaaaatagttccatttgacagctctaaatacactggcttgatttctccatcattgtattttttatttagatcgccactcataaaagatttgaatttaatcccacaagaatctggattagtatccaatacataaaaaataccaccaggttttaatgtcctgtgaacttccttagcgattttcaaaagatcagacttttcactgttagtgacgaacacgtaacagcatatagctgcgtcgaaagtattatcattgaagttaaggacatcagttgtaatttgatgataagaactattgccacgattgatattgctggcggctttgtccaccatggtttgtgaaatatctactcccgttaccgtctttatgccgccagcaattagccgacgtgacactttcccaccaccacaaccgtaatcaagaaccgatacgttttgccccaagctctccttaaggttctcaatcaacggcgtgtacccaagtctgtcctccaaataatcatcatattgatcgaataaatttgaagcctcttcattcatccagttagtattcatttgttatctcatattcatatgtgtgtatacccgttatctttcaagttgcttctttgttggctgcactcactcaccccggtcgcattggtttttgcaatagctaaatcatatttagcaatattgctttttctttaaattgatcacgctcctccaaaaccccattgtgaaaaaaattcaatatcaacatgacataaatacaactatgtgtatatgagtattatctatatattgagccaaatcacaatattccttttttttcggaggtttcttgtatatatacctaatccactcgaatcctgcactttcaaattaattggatatattatcatgctaaaaatagtttaaaaaaataataactatattcattaaaaatcactaccttatacagactaatatatagtcgcgataattattaaaataataaccaaaaagaaaaaatatcttttctaattatccccttcgctcatcacaaaatattaatcactttactttccataaaacaccattcaaaacaatagcaattatttcataagtttatcatcaataaacttaattattatttacgtgattataaattttgttattgcattgtcacaggcatttagagaaacaatagataataacgttatgaaatagttaatgaccgaatgataccgttttatctacccgttactttcagcctatttcaacccgttatcagatgtcatatttgctgccttattttaatgaatatcaataacttttttattgtatccatgatacgcaaggcagcatcactaccttatttaacatttaaaaggaataaacatgagcacagtcacgccagaacgccctgaaatgacacaacaggaacaaaaagctaaccaactgcatgaagcgagtatcctcaaacgtgctaatcctcaattacaaaatgcggtacatcttgctttaaccacacctcatgccgatcaacaaggttataacagtaaatttggtggccgtgccagccagtatgtcgcccccgacgcagttgcttccatgttctctcccgctgcttatctgactgaactttaccgtcaggcacgggatttacacgcagaaagctccatttatcatctggataaacgccgcccggatctaaaatcactgatactcagtcagcaaaatatggatgatgaaatttctacactttctctgtccaataaagtgttgctggaagggattcagacgcaggccggacagcaaggccatactcatgtgatgaaagcgctatcaacctttcactcttcgggctctctgccatatcacgatgcttacgaaaatgtacgtaaggttattcagttacaggctccggtatttgagcaattcaatacttccccagaaacaaccatcgctaaactgaaataccaaacttccctattggggattaatatttccatctctccagaactatttaatatcctaacggataaaattacagatgacgaagaggaaattaaaagactctataaaaaaaactttgacgatattcagccctctttaatggcaacgttagaatatctaaaaatctattataacttaactgatgaagaaattaatcagtctattaatcaacgaaatattgaacgaatacataatgaaatgaattcaaaatatggcagccaacaacccgctcaatattatctcctcaagcttaataagattattcttgtgtcacgagccacagacatggcaccagaaatccttaaaaaaattgcctctagtagaacttatcacgcaatatcccaacctatggaagtcatcctagaatataaccctactatatacgatgagctgaatgacataccagacatcaatacagagatattaaagaaaatatttcgcgttaaatactatatgcaacgttacaatattgatgctgaaactgcattgatactgtgcaatgcaccaatttcagaagactactatagccctagccccaatcaatttaatcgtttatttaataccccaccattaaatagccgggatttctacgcttcagatgaagagattgatttaagccaaaacagtgctgatagccggcaaaaagaggtacttaaacgtgcttttaatgtcgatgatatatcactttatcaattactcaagatgactcatcgtgacaatggaaatggaaaaataatcaataacttaactaatatttcttatctctatctgaccaaattactagcagatgtccatcaattaactgttaacgagctgaatttactgctaattgccataggtgaaggatcaaccagtttatctgggatcagtgatgataatctgtctgttctgattgacaaactttataacgttacccagtggttgcatgcacagaaatggaataagtgcctgttgtttatgatgaccaccaccgactataacaaaaccctgacgccagaaatccaaaatctgctagatgctgtctacaatggtttgcaagaccttaacagcgaaaacgaggcaaatcttctgttgaagatctctccctatatcgccgccgctctgcaattaccatctgaaaatagcgcttactatatgctcacttgggcagatcaattaaaacccggctctggtgcaatgacagcaaaaaaattctggaaatggttgcaatctcaacacaccccagaacaatcaactactgagacagaagaacaagccgtccaatattgtcaatgcctggcacaactagcgctgatttatcattccatcggccttagcgaaagtaccttacgtctgtttgtcacaaaaccacaacactttggtcttaccgcaggagcaacgtcaacacacaatgcattatcactgataaaactgacgcgttttgctgactgggttaactctctgggtgaaaaagcctcttctgttctgaccgaatttgaaaagggaacattagagaccaaacagttggctgatgccatgagtcttgataaaaatctactggaacaagccagtactcatgtacaagttaatttctccaactgggcatctctcgacaccatccaacaatgggtgaatatcgcgcgtcaattaaatatctctccacaagatgtttctacattggcgcaagtattagacatagaaccttccactgactatagccaatgggaaaaaatagcggccatattaaccgccgggctcgatacccaacaggccaacaccctgcacacctttctggatgaatctcgcagtactgcattaagcgagtactacattcataaggtcgctaacgcagaggcaaaaattaaaaaccgtgatgatctgtaccagtatttattgattgataatcaagtttccgccgccatcaaaaccaccccaattgcggaagctatcgccagcatccaactgtatattagccgggcactgaaaaacatggagggaaacgcagtttcgcaggttgccaaccgaccattctttaccgattgggataaatacaataaacgctacagcacttgggccagcattgctaagctcatttactaccctgagaattacatcgatccgacaatatgtatcgggcgaacaaaaatgatggatacgttgctgcaatccatcagccagagtcaattaaataccgatacggtagaagacgcctttatgtcttatctgacgtcgttcgaacaggtggctaatctggaaattgtcagtgcctatcatgacgacatcaatagcaatcagggattaacctactttatcggacacaataaaacagaagtgaatcaatattattggcgtagcgtggatcacaataaattcaatgacggtaagtttcctgctaacgcctggagtgagtggtacaaaattgactgtccaataaatccctataaagacactatccgcccggtaattttccaatctcgcctgtatctgatctggctggaacaaaagaaaattgctaaacagacagataataatcaaaccatcgaatgttattattatgaactaaaactagcacatatccgttatgactggacctggaatacaccaataaccttagaagtacatgacaaaatatccgctgttttgaaaacatcagatttattggaccaattgcaagagtaccaaaagcaattagaagataaactgaaagaacagcaggaagaagtagagcgactaaaaccaatcgcaccactaaatccagtaagtccaccacaacctatagcgccactaaaatcattacaactattgccaccgctaatagaacaacggaaaaaacaactggcgcaatgggagagagagttgaatgaacagggacaatcaacgacagagataagcgtaagggaaaaacagctggaattgaaccaacaggatattcagaaggagttggatcgattagaatcagagctaataagaaaacaaccagggttctactgtgcaaatcaccaagacaataagttgttagtcatattttatcaaaaacaggatgcactggataaatacacaacagatgcgcccataaaagggctatatatctcctcaaatatattacccgaagatatcaatctcggagattacatacctaacattcgtaaccagtttgataccgatattggcgtcaacggtattattaaggtgaataaccgatatgaagtctcttcatcaatagagataagtgaccataatatcctgaccctttaccacgacacaaacggagcgcagtatatgcagtggggagcctatcgtatccgccttaataccctgtttgcccgtaaattagtcagtcgcgccatgtctgggatcgatactattttaagtatggaaactcagaaactatccgaaccccaattaaaggcagggtttttcgctaattttactcttcctaaatacgaccaaaacatacacggcaatgaacgctggtttaaaattcacataggtaatattaatggcgataattcaatgaggttatattaccaaggaacactaacggataatgaaaccagcattaccctatttgtcccctataaaaaagacctctatactatggaaggcgtcagaataggtgtgcaatacaagcaaaaattttatcaagattggtgggaaccagctttcttctatttcaacgaaactcagcaaaaatttgtactcattaatgatactgctcatgactcagctatgacgcatggaggcgaacgatcaccagtcaaaaaataccaaggcttttctaatgtttctgttctatccgagcacacggaaccaatggatttcaacggagctaatagcctctatttttgggaactattctactatgccccgatgctgattgctcaacgtttactacacgagcaaaacttcgatgaagccaaccgttggctgaaatatgtctggaacccatccggttatattgaacatggtcaaattcagcactaccgctggaatgtccgcccattattagaagatacccgttggaacgacgatccactgaattccgtcgatcctgatgctatcgcgcaatacgatccaatgcactataaagtcgttacttttatgcgcacccttgatctgttgctggatcgtggagattacgcctatcgtcagttagagcgggacacactcaacgaagccaagatgtggtatatgcaagcactgcatctgttaggcgataaacctcatctatcgttcagttcagagtggtgtaaaccgagtttaggtgatgctgccagaacggaaaaacaggaggaacacgcccaggcaatgaccgccttgcgacaaggtgatattagccgtcacagcaacccgacagatcttttcttgccacaggtcaacgaagtgatgcaaaactattggcagaaactggaacaacggctgtataacctgcgcaacaacctctctatcgacggtcaaccgctacatctttctatttatgctactccagcagatccaaaagcgttgcttagcgctactgttgccagcgcacaaggcggaaacaagttaccgacaccatttatgtctctgtggcgtttcccacagatgctggaaaacgcgcgcggtatggtgagtcagctaacacagttcggttccacgctacaaaatattatcgaacgtcaggatgcggaagccttaaacacgctattgcagaatcaagccgcagaactgatattgaccaatctcagcatacaagacaaaaccatcgaagagttggatgcggaaaaaatcgtattggaaaaatccaaagccggggcgcaatcacgctttgacagctacaaaaagctatacgatgaaaatatcaatgcgggtgaaaaccgagtgatggcattgcatgcctccattgctggcctcagcaccgccctgcaagcatcgcgtctggccggtgctgcccttgatctggcacccaacatttttggtttcgctgatggcggcagccgttggggggctattgccgaagcgacaggtaatgtcatggaattctctgccagtgtgatgaacaccgaagcggataaaatcagccagtccgaagcctatcgccgccgccatcaggagtgggaaatccagcgtaacaatgccgaagcagagataaaacaaatcgacgcccaacttcaatcgctggcaatacgccgtgaagcggcagtgttgcagaaaaccagcctaaaaacccagcaggaacaaactcaggcacaattgactttcctgcaacgtaaattcagtaatcaaacgttgtaccactggctacgtggtcggctagcggctatttatttccaattttacgatttggccgtagctcgttgtctaatggccgaaatggcttatcgttgggaaactaatgataccgccgcaaactttatcaaacccggtgcctggcaagggacacatgctggtctactcgctggtgaaaccttgatgctgaatctggcacaaatggaagatgcctatttgaggtgggatcaacgcgctctggaagtagaacggaccatttcactgacgcaattctatggagcactgccagaaaaatcgtttaatttggcaacacgtatttctgccctgctagcaggtggtacaactgaccccgttgaccatccccctgttacattagaaaacgaccaactcagtgccaaaatctcactgtcagatctgtcactgcatagtgactacccagaaggcaacggcgtaggcaacattcgacgtattaaacagatcagtgtcaccctgccagccctgttaggaccataccaagatgtacaagccattttgtcctacggaggaagtgaaaccggattagctgaaagctgtaaatcactggcgatttctcatggaattaatgatagtggtcaattccagttggattttaacaatggtaagttgctgccatttgaagggatagcgattaacgatactggcacattaacactcaatttcccgaatgcgactagcaaacagcaagccatgttgcaggcattgagcgatattattctgcatattcgctacaccatccgccagtaaccatctcaatcaaacactaaaaacaggcccctaaacgggggcctgaacctttcaccacattcaccatctgctttcttacctgtctagcgctcgttataacagagatatttccttttctcgtgagtccgattacctactataaaatatcaaccctcttctttttcgtagcatgcaatatgtaacaaatgcaactatttcatttggttattgttaactaattatattacttatgatgtaattataatttttgttattgcatcacaacagccatttaaataaataataacgttacgaaatagttgatagttaaatggtgtttttatttgaccattattttcaacctaatttcagaccgctatcaaacgttacctgtgttgcctttatttggatggagataaataaccttatttatctccacgagatgcaagccagcataaatgttttattgactcaatatttaaaaggaataagcatgaacacactcaagcccgaatatcaacaagcgttaggagcagattttaatctaaccgatatttgccatctctcttttgacgaacttcgcaaaaaagtgaaggacaaactctcatggtcacagacccagagcttatatcttgaagcacagcagatgcaaaaggataacctgctgcatgaagcccgtattctgaaacgcgcaaaccctcaattacaaagtgcggtacatcttgccctgacaactcctcatgccgaccagcaaggttacaatagccgatttggcaaccgcgccagtcagtatgcagcccctggcgcaatttcctccatgttttctcctgcggcttatctgactgaactttatcgtcaggcacgaaatttacatgctgaaggttccatttatcatctggatacacgtcgcccagatctaaaatcattggtactcagccagaaaaatatggatacggagatttccacactttctctgtctaataacatgttactgaacagtattaagactcagactaatttggacagccacgctgaagtgatggaaaagttatcaaccttccgcccttctggctcaatgccatatcacgatgcttatgaaagtgtacgtaagattattcaattacaggctccagtatttgagcaattaagtgtattcccagaaacaacactctctcaattgaagtatcaagcttccctgttggatattaatgcttccgtttcaccagagttatttactattctgacaaaagagattaccgggtctactactgaaactctttataataataattttggtgatattaaaccttctctgacaaaaaaactggaatatctgaaaagttattacaatctgagtgatgaagagtttagcgacttccttaaaataagaactatacttctcccagaagaagaaataacaattactgagcctgcatcgcatactactaatacacaacaaactatcgaaaagactgattatcgtgctctgttgaaaattaataaatttatttatctattcaaagctataaacttatcaccaacggtattaagtggaatcctccgcagtatcagtccagaattcaacatcaatgaagaagtgttaaaaaaaatcttctgtattaaatactatatgcaacgctacggtattgatgctgaaactgcattaatactgtgcaaagcaaccatttcacaacatagcaatgacggtcatccaagccagtttgatcgtttatttaattccccaaaactaaatggtcagggtttttccaccaatggcactccagagattaatttaaacctcagcaataccaatgacagaaacaaaactgtacttaaacttgcttttaacctcgatgatatttcattaaatcgactactaaaggttaccaatccggtcaatactaccgaaatgataactaatgatatagagaatctttctcatctctatcggacaaaattactggcagatatccatcagttaactattgatgagttaagtttactactaattaccataggtgaagaaaaaaccaacttatctaccatcaataatactgatctggtcaccctgattgataaactctatgccgtcactcgctggctacgtacacagaagtggagtgtctatcagttatttgtgatgaccaccaccaactatgacaaaaccctgacaccagaaatccaaaacttactggatactgtatataacggtctgcaaaactttgacaagaaaaaggcaaaaaccaaagaagagctattaaaagccatatctccttatatcgccgctgctttacaattaccatctgaacatgcggcatatttcatactcacctgggcagataaactagaacccggtacaggaaacatgacagcggaaaaattatggaactggttgcgaataaatcccgttaccgctcaaccagaattccaaaaacaagctgaactcgtggtccagtattgccagtgtctagcacaactagcgctgatttaccgttccatcggccttaacgaaaataccttacgtctgtttgtgacaaagccacaacactttgttattaaaaccaaaaaaaccgaaacaattgaggcaactgaaacaaccgagacaataccagcacatgatgtatcaacactcatgtcactaacgcgttttgctgactgggttaactcactcggtaaaaacgcctcttctgtactgaccgaatttgaaaagaaaacattaacaacagagctattggctaaggccatgaatctcgatgaaaagctgctgtcacaagctaagacccaggcagaaactgatttatccaactggtcatctatcgacagcctattacagtggattaacatctcacatcaattgaacatctctccacaaggtgtttcagcactaacgcaaatattaaatacagaatcctcctctgactatacccaatgggaaaacgtcgctgcgatattaacctccgggctgaacacccaaaaagccaataccctacatgcatttctagatgagtctcgcagtgctgcgttaagtacatactctatttattctcataaccaaaaagatcgagaagaaagaaaacatacggtaattaaagaccgtgatgatctatatcaatacctactaatcgataaccaagtttcctcagctatcaaaaccacggagattgcggaagctatcgccagtatccaactgtatattaaccgcgcattgaaaaatatggaggaagataccgacacaagtgtcaccagccgttcattcttcaccaactgggataaatacaacaaacgctacagcacctgggccagcattgctaagctcctttactacccggaaaattacattgagccaacattgcggatcggccagacaaaaatgatggatgcgctactgcaatccattagccagagtcaattgaataccgataccgtagaagatgcctttaaatcttatctaacgtcattcgaacaggtggctaatttagaagtcatcagcgcctatcatgacaacattaataatgaccaaggattaacctattttatcggacgcagtaaaacagaagtgaatcaatattattggcgcagtgtagatcacaataaattcagcgaaggtaaattccccgctaatgcctggagtgagtggcacaaaattgactgcccaattaatccctacgaagatactatccgcccggtaattttccaatcccgcctgtatattacctggctggaacaaaagaaggtaactcatcgatcagaaggagaaactctaccaaaagtagaagctctatcagaaataaaaactgacaaacaaggaagcaaaaccaccacaagctattattatgaactaaaattggcacatattcgttatgacgctacctggaatacaccaattacctttgatgtagataaaaaaatatctgatctcaatctagaagcgaataaagtgttagggctctattgtgcgagttatcaaggcaaagataagttattggtgatgttttaccaaaaaggtcctgaacaggcgagttatataaatgctcccatgcaagggttatatatctcttccaatatgtcacaagaagagatgaatcctaatgattataaacttaatattcataaacagcttgatacccatactgcaaccaatagtgttataagagtcaataaccgctatgcagaaagctacgaaatcccttcatcggtaaacaataataatggttatgattggggagaaggctatctgagtatggtatacggcgggagtattctaattacccgcaaccaaagcgataattcaaaaatccaaatctcaccaaagttaagaattattcataatggatatgaaggtcgacaacgtaatcagtgcaatctgatgaaaaaatatggcaaaccaaaagataaatttattatttataccacgctaggcattaaccaaaataatttgtcaaataaaaaattcatctaccctgtttatcaatatgaaggaaatgccagccagcttagtcaaggaagacttctattttatcgggatagtgccactaattttgtaagagcctggctccctaaccttccctctggctctcaagaaatgtccataaccaccggcggtaacattagtggtaattatggttatattgataataaacatagtaacaacaatccattcaaagaatatttctacatggatgaccacggcggtattgacactgatgtttcggggccaatgtttattaatacaaatattcagccttcaaacgttaaaatcacagtgaaaacagtgaaggaggatggaaaattaactagtgagccatatacagcgaacgacaaagtttcagttaaaccaccactcaacttcgaagaaatgtgttaccagtttaatggtctcaaagaaatagacgtctccaaactagtatttaaaaataatgaagcaagtattgatatcacctttacagcatttgctgatgcatttgaaagtggtcagaaagaacgtaacctaggcgaagaacattttagtattcgtattatcaaaaaatcggagactaataatgtcctatcccttcacagtaattcaagcggggcacaatatatgcaatggggagcctatcgtactcgccttaatacgctgtttgcccgtaaattaattagccgcgccaacgcggggatcgacactattttgagcatggaaactcaaaatattcaggagctacaattaggcaaaggtttctatgctacattcgtaatacctccctataacccatcaactcatggtgatgaacgttggtttaagctatatatcaaacatgtctctgataataactcacatattatctattcaggccagctaaaagatacaaatataagcatcacattatttattcctcttgatgatattccattgaatcaagatttccacgccaaggtctatatgaccttcaagcaatcgccatcagatggtagctggtcgggtcctcactttattagagataataaaggaataataacaataaactccagctccattttgacccattttgaaagtgtcaatgtcctaaataatgtgagtagcgaaccaatggacttcaacggcgcgaacagtctttatttctgggaactgttctactataccccgatgttgattgctcagcgtttgctgcacgaacaaaacttcgatgaagctaaccgttggctgaaatatgtctggaacccatcaggccatattgccaatggtcaaaagcagtatccccacacttggaatgttcgcccattacaagaggacacgagttggaacgatgatccgttgggttcatttgatcccgatgccatagcgcaatatgatccaatgcactacaaagtcgcttcctttatgcgcacccttgatctgttgatcgaacagggagattacgcctatcgccaattggagcgggacacactcgccgaagccaaaatgtggtatatgcaagcattgcatctcttgggtgataaacctcatttatcactcagttcaacatggaatgatccagaactagaagaggccgcagatcttgagaaacaaaagacacatgccaaagcagtagcagatttacgacaaggccagtctacaggtggaagcaacacagatcttttcctgccacaggtcaatgaagtgatgctgagctattggcagaaactggaacaacggctgtataacctgcgccataacctctctattgatggtcaacctttacatttgcctattttcgcaacaccagccgatccaaaagcgctgctcagcgccgctgtcgccagttcacaaggtggaaataatcttccgtcagcgtttatatcagtttggcgtttcccacacatgctggaaaacgcccgcagtatggtcagtcaactcacccaattcggctccacgttacaaaatattatcgaacgtcaggatgcggaggcattaaacacgctgttgcagaatcaggcggcggaactggtattgaccaatctcagcatacaggacaaaaccattgaagagctggatgttgaaaaaactgtgctagaaaaaacccgcgccggggcccaatcacgttttgatagctacagcaaattctacaatgaagacatcaacgcaggtgaaaaacaggcaatggcgttgcgagcctccgtcgctggcatctctacggcccttcaagcatcacatctggcaggcgctgcacttgatctggcccccaacatctttggcttcgctgatggtggtagccattggggggcaatcgcccaagccacaggtaatgtcatggagttttccgccagtgtcatgaacaccgaagcggataaaattagccagtctgaagcctaccgtcggcgtcgtcaggagtgggaaattcagcgtaataacgccgagacagagctgaaacaaatcgatgctcaacttggttcgctggtagtgcgccgtgaagccgccgtgttgcagaaaaccagcctgaaaacgcaacaggaacagactcatgcacaactgaccttcctacaacataagttcagcaatcaagctttgtacaactggctgcgtggtcggctgtccgccatttacttccagttctatgatttaacagtagctcgctgtttgatggctgaaatggcctatcgctgggagactaacgatgccgcagcacgctttatcaagcccggtgcctggcagggaacccatgccggtttgctggcaggagaaaccttaatgctgaatctggcacaaatggaagacgcgcatctgaaacaggagcaacgcgtactggaagtagaacgtaccgtttcactggcaaatatctataaagagaaaggtcaattttccctgactgagaaaattgcagaactgatgaagaataaattagtcactgccggtagcggaaataacaccctgaagtttggtaccggaaatgcccaaacgtctctgcaagcatccatttcgttagctgacttacaaattcgtcacgattacccagaaaacagtggagtcggtaacgttcgccggattaaacagatcagtgtcaccctgccagcactgttaggtccctatcaggatgtgcaggcgattctgtcttacagcggagatgtcactggattggctgaaagttgcaaatcgttggcggtttctcatgggatgaatgacagcggccagttccaactggatttcaacgatggcaaattcctgccatttgaaggaatcgacattgataaaggtacgctgacattgagcttcccaaatgcaattggtgaaggaagcaaagaaggcaaacaaaaaaccatgctggagagtctaagcgacatcattctgcatattcgctacaccattcgccaataacgatttcaattaagtgctaaaacaggcccctaaatggggcctgcaaggagtctttcatgcaaaattcacaagattttagtattacagaactatcattgcccaaaggaggaggcgctatcacgggaatgggggaagcgttaacccccgccggaccggatggtatggccgcgctatctctaccattacctatttctgccgggcgcggttatgccccgtcactcgccttaaactacaacagcggtgccggtaacactccatttggtctgggttgggattgcaacgttatgaccatccgccgccgcacccattttggtgtcccccattataacgaaaccgatactttccttgggccggaaggcgaagtactggtagtcgcggatcaaccgcgtgatgaatcgacattacagggtatcaacctaggcgctaccttcaccgttaccggataccgttcccgtctggaaagtcatttcagccgattggaatattggcagcccaagacaacaggcaaaacagatttttggctgatatatagcccagatgggcaggtacatttattgggtaaatcaccgcaagcacggatcagcaacccatcccaaacgacacaaacagcacaatggttgctggaagcttctgtatcaccacatggtgagcaaatttattatcagtaccgggccgaagataacttagattgtgaaactaatgaaattacgctccatccacaggccacagcacaacgttatttacatatagtgtattacggcaaccggacagccagcgaaacgttacccggtctgaatggtcgcgccccatcacaagcagactggttgttctacctggtatttgattacggcgaacgcagtaacaacctgaaaatgccaccagcatttacagcaacgggtaactggctttgtcgtcaggaccgtttttcccgttatgaatatggctttgcattacgtactcgccgtttatgccgtcagatactgatgtatcactgcctgcaagcgctggataataagataaaagaacacaacggaccaacgctggtttcacgcctgatactcaattatgacgaaagcgcaatcgccagcacgctggtattcgttcgtcgagtaggacatgagcaagacggtactgccgtcaccctgccaccattagaattggcgtatcaagatttttcaccgcaacataacactgactggcaaccgatggatgtgctggcaaacttcaatgccattcagcgctggcagctagtcgatctaaaaggcgaaggattacccggcctgctatatcaggataaaaacgcttggtggtaccgttccgcacagcgtctgggtgaaattggctcagataccgtcacttgggaaaaaatacagcctttgtctgttatcccttccttgcaaagcaacgcctcgctggtggatatcaacggagacggccaacttgattgggttatcaccggaccgggattacggggatatcatagtcaacgtccagatggcagttggacacgttttaccccactcaatgctctgccggtggaatatactcatccacgtgcgcaactcgccgatttaatgggagccgggctctctgatttagtgctgatcggccctaatagtgtgcgtttatatgccaatactcgtgacggcttcgccaaaggaaaagatgtggtgcaatccggtgatgtcacgctgccagtaccgggtgccgatccgcgtaagctggtggcgtttagtgatgtattgggttccggtcaggcacatctggttgaagtgagcgcaactaaagtcacctgctggcctaatctggggcatggacgttttggtcaacccattaccctgccgggattcagccagccagaggctatatttaacccggctcaagtttatctggccgatctggatggcagcggcccaacggatctgatttatgttcacaccaaccgtctggacatcttcctgaataaaagtggcaacggttttgccgcaccgatgacattgcgcttcccagaaggcttgcgttttgaccatacctgtcagttacaagtggccgatatacaagggttaggtgtcgccagcctgatactgagcgtgccacatatgaccccccatcactggcgttgtgatctaaccagcgcaaaaccgtggttactcagcgaaatgaacaacaatatgggagcccaccacaccttgcgttaccgcagttcctcccagttctggctggatgaaaaagccgcggcactggttgccggacaaacaccggtttgttatctccccttcccggtacacaccctatggcaaacggaaacagcggatgaaatcagcggcaacaaattagtcacaacactgcgttatgctcgtggcgcttgggatgggcgtgaacgggaatttcgcggatttggttatgttgagcagacagacagccatcaactggcccaaggcaacgcgtcagaacgcaccccacccgcgatgaccaaaaactggtatgccaccgggctaccggtaatagataacacattatcaacagagtattggcgtggtgataatcaggcttttgccggtttttcaccacgctttacgacttggcaagatggcaaagatattctgttaacaccggaagatgataacagccagtattggctaaaccgggcactgaaaggtcaactgctacgtagtgagctgtacggattggacgacagtacaaataaacacgttccctatactgtcactgaatttcgtccacaggtacgtcgattacagcaggcagataaccaatacccggtactttggtcatctgtagttgaaagccgcagctatcattacgagcgtatcgccagcgacccacaatgcagccaagatattacgctatccagtgatctatttggccaaccgctaaaacaggtttcggtacagtatccacgccgaaagcaaccagcaatcagtccgtatcctgatacgctgcctgatgaattgttagccaacagctatgatgaacagcaacgccaattacggctcacctatcaacaatccagttggcatcatctgactgacaataccgttcgggtgttaggattaccggatagtacccgcagtgatatcttcacttatgaagctaaaaatgtacctgctggtggtttaaatctggaactactgagtattaaagatagcctgattgcggataataaaccgcgtgaatatctcggccagaaaaaaaccatttataccaatgggaaaaatgcagcgccattgcaaacgccaacgcgacaagcgctagttgcctttaccgagacaacggtatttagtcaatccacactatcagcgtttgatgggagcatcccatctgctcaattgtcaacgacgctggaacaagccggataccaacaaacaaattatctatttcctcgcaccggagaagataaaatctgggtagctcatcatggttataccgattacggtacagccgcacagttctggcgcccgcaaaaacagagcaacacccaactcacgggcaaaattacactcacttgggatgcaacctattgcgttgtcacacaaacccgagatgctgctgggctgacaacctcagccaaatatgactggcgttttctgacccctgtgcaactcacagatatcaatgacaatcagcaccttatcatgctggatgcactgggccggccaatcacactgcgcttttggggaactgaaaacggcaagatgaccggttactcttcaccggaaaaagcaccgttttctccaccgtccgatgtgaactccgctattgagttaaaaaaaccgctccctgtagcacagtgtcaagtttacgcaccagaaagctggatgccagtattaagtcagaaagccctcaataggctggcagagcaagatcggcaaaagttatacaatacccgaatcatcaccgaagacgggcgcatatgtacactggcctatcgccactggtcacaaagtcaaaaggcaacccctcaactcactagcctgttaaacaacggcccccatttaccccctcacagcctcacattgactacggatcgttatgatcacgatcctgagcaacagatccgtcaacaggtagtattcagtgatggctttggtcgcttactgcaagccgctgcccgacatgaagcaggtatggcttggcaacgcaataaagagggttctctgatgataagtgtcaagcatactgagaatcgttgggcagtgactggacgaacggaatatgacaataagggacagccgatacgcacctatcagccctatttcctcaatgactggcgatacgttagcaatgacagtgcccggcaggaaaaagaagcttatgcagatacccatgtctatgatcccgttggtcgagaaatcaaggttatcaccgcaaaaggttggttacgccgaaccttgttcactccttggtttactgtcaatgaggatgaaaatgacacggctgctgaggtgaatgaggtgaatatgtaacttgatcaatcccgcctgcctaacaggcgggaaacagagatggaggtgaaaggtgttgctcataataccgtcagatactcaacttatcatctggttgatcattggttttattgcggcctggggcggcctcgtaaggtacctcattgatatgcaaaacaaacaatataaatggagttggatcaacgtattctgtcaactcatcatctcctgctttaccggtgtactaggaggattgctgagttttgaaagtggcggcagtatctatatgacttttgcaattgcaggtttattcggcacaacaggaagtaccggactgaactggctctggcgccgcctcattacgtatcatcatgatcatggaaggaagcaataaggccccactgccacaataaaccatcagtctctagttaacctgcaaaattatcgactacactatcgactatcgtaagaaaactaacatacagacaacaattgcgattgcagaaaggattacacacaacaacccaacaacgaggtaactcatgaaaaacattgatcccaaactttatcaaaagactcccgtcgtcaatgtccaagacaaccggggtctgacaatccgtaacatcgattttcaccgtaccactgcaaacggtgataccgatacccgtattacctgccatcaatacaatactcacggacacctaagtcaaagcatcgatccacgcctatatgaggccaagaaaaccagtagtacgatcaaacccaattttctctggcagtatgatctgaccggcaatcccctacgtacagagagcattgatgcaggtcgcactgtcaccttgaatgatattgaaggccgtccgctgctgacggtgacggcaacaggtgtcatacaaacccggcaatatgaaacttcttccctgcccggccgtctgttatctgttaccgaacaaacaccagaggaaaaaacatcccgtaccaccgagcgcctgatttgggccggcaataccgaagcagagaaagaccataaccttgccggccagtgcgtgcgccactatgacacggcgggagttacccgattggagagttcgtcactgaccggtactgttttatcgcaatccagccaactcttgctcgacactcaagcagctaactggacaggtgataacgaaaccggctggcaaaacatgctggctgctgacatctacaccatcctgagcaccttcgatgccaccggcgctttactgactcagaccgatgcgaaaggcaacattcagaggctagcctatgatgtggccgggcagctaaacgggagcgggttaacactaaaaggtcagacggaacaagtaattatcaaatccctgacctattctgctgccggacaaaaattacgcgaggaacacggcaatggtgttatcaccgaatacagttatgagcaggaaacccaacggcttatcggtatcaaaacccgccgttcgttagacaccaatccgtcagacaccaaagtgttgcaagacttacgctatgagtatgacccggtaggcaatgtcatcagtatccgtaacgatgcggaagccacccgcttttggcacaaccaaaaagtggtgccggaaagtacttatatctacgactccctgtatcagcttatcagcgccaccgggcgcgagatggcgaatataggtcaacaaagtcacccatttccctccccggctctaccttctgataacaacacctacaccaactatacccgtacttatacttatgaccgaggcggcaatctgactaaaatccagcacagttcaccggcgacgcaaaacaactacaccacaaacatcacggtttctcaccagagcaatcgcgcagtactcagcacactgaccgaagatccgacacaagtagatgctttatttgacgcaggcgggcaccagaacacgttgatagcaggacaaaacctgaactggaatccacgcggtgaactacaacaagtgacattggtgaaacgggacaagagcgccaatgatgatcgggaatggtatcgttatagtggtgacgggagaaggatattaaaagtcaacgaacaacggaccagcaacaacgctcaaatacaacgaataacttatttgccgagtctggaactccgtctaacgcaagacaatacgaccacaaccgaagatttgcaagttatcaccgtaggagaagcgggccgggcacaggtacgcgtattacattgggagagcggtaaaccggaagatatcgacaataatcagttgcgttatagttacgataatcttatcggttccagtcagcttgaattagatagcaaaggagaaattattagtgaagaagagtactatccctatggtggcacggcattatgggcggcaaggaacaaaacagaagccagttataaaaccatccgttattcaggcaaagagcgggatgccaccgggctatattattacggttaccgatattatcagccttgggtaggacgatggttaagcgccgatcccgcaggaacaatcgatgggctgaatttatatcgaatggtgaggaataatccaattaaatatcatgatactgatggtagagcccctgaaattaaagatgtcgaacacacggtgatatatggtttcagtcatcaccgcggatcagaaatggggaaggcattcgcggctaataagaatcctgttaccatcgatgaatataatgctgggcttggtatcatgggtgaattaagtctgtctgattattttagaatttctcaaaatcttaaagaagacagtccacctaaattgaatgaggaaaatataagaactaactcaagtaaatatctggtagcaatgggtatagaggaaagttcagctactgataaaatcaaacaggaagcctatgaacaacaatatgcttacactgcgtcatggagttttcatatggtagaaaataaaggaaaattagatattcaaagtaaagtaaaaaatcttctcccctcaaaaagtcttttcagtgggttatccggccaaaaacgattccaaaaattagatgcatttattttaaaaaatagtgatggtagcgatttcactattcaaaggcagagagatatattaacgaaatttgcttccgcaggaaatacaggagaacttgaaagcaccttatcagcagcagaccaatcatggctaaaaaatactattgcaacggcattctttagacaaacaagtaaattaggtatggattggtttataaaacaactagcatcacctgatttcagatttgttatggctggatataacggggaaaaattgactatcgagcaattaaaatcagaacaaccctggaaaacaggaaaaagaaggaaagaaggtccgaatgaatatgccgaagcaataactttctctgaaattcgtcacgcctatagaaaaaaatacgacagtacaataaactttatccagaaataattagggacaagccatgaggaaatatttatctcatggcttgatgacttttaatataaaataattaaaacaatatctaacccattaaaataacaataccttatctctcatcctaaaatatcaaatcagaaattaatgaatttaatggttctttatatttatttctgagagcataagcacaatatcttaccgatggttctggatatgattcaaaattcagaaatgttatacctttatcaatatgggcagaatagcgcatttcattgggggtcattaaacttatcgcgacccctgcttttatcagttccaatctattagtaaaatcagggatcgttaataacgctaaattttggtattcaggtggataattcaatggcataaaattatcgcattgttttaaaaaggcactattatgctgaaccaaaggaaaactatatattatttcatcaacatgactctctggttctaaaatatcattggatacagcaagagacaacttttgataagcaccatctatcctgatgatatcatcattatctggataacattcagtggtcacataaaccgttatatcctctttcattaaggaagaaaatactgcatcttgtcttattaaatcatcaatgaggaaattgttgattatacaaatatcgcggtaatgataacgttgcaccgctctttttacgaccgtagatatcttattaacatattctccactggtgccaataaccagtttatctctgcttgatgatttgcaatttctacgacaattccagttatcctcaactttctgaattctttcataacatggcaacaactcttgatataacgccctgccctcttctgtgagcttggtttttcccggtagtcgctcgaataattggcaccccacacgttgttccagttgatatacgagcctgctaagtggagagggggtaatacaaagtgtatccgctgctaacgtgaatgactctttcttcgctgattccataaaatactttagttgctttgaacaaaatatcatcacacaccctcttgtttttattccagaaatagaatattaaccatagaacatgacaacgatgtttctactttgcattcttttacattaggagatgcattaattgatattggatttcaccacctaaattatgaaaatttatttaacacttgcataatgattataaaataaatataacttaccactatattagcataattattttaattaaaattaatattctgttattgcacataaatatctcattatcattcatattttacatttcaattagttgcaaaattatcggcaatattcccattaaatgaatttcaatataacattaaataaactatataatttacactcatcataactgaatttcattattctttcattgctcatcaatcatgatgtaaacaataacagcttattccctccagatttgatcaaaaaacaattgcaaattttgcggctgctttttttgcaacagctatttaaagaaaacagtgacatagtgatgatcctcatttcctatagaacggaatcactctcttctcttattgtatcgatttgtatcgatggtacagaaatcacacggatgttttatttaccttatgatttaaaaggaataaacatgaactcatacgtgaaagagatacctgatgtattacaaagccaatgtggtattaattgtctgaccgatatttgtcactattcttttaatgaattccgtcagcaagtttctgatcatctctcctggtcagagaccaaccgcttatatcgtgatgcacaacaggaacaaaaagagaatcaattatatgaagcaagtattctcaaacgcgctaacccacaattgcaaaatgcagtacacctcggaattaccctccctcatgctgaattgcaaggctataataatgaatttggtggccgagccagccaatatgtggcaccgggttcggtttcctctatgttctcccccgcggcttatttaactgaactctatcgtgaagcacgtaatttacatgccagtgactccgtttatcatctggatcaacgccgcccagacctccaatcaatgacgctcaatcagcaaaatatggataccgagctttccactctttctctgtctaatgaaattttgttggaaggagttaaagctaatcagcctaatctggacaacgatactaaagtgatggcaatgttatccactttccgtccttccggcacaataccttatcacgatgcttatgaaaatgtgcgtaaagctatccaattacaagatcctcaacttaagcaatttcagcaatcaccggcggttgctggattaatgcatcaagcttcattgttaggaattaataactctatctcgccagagttatttaatattctgaccgaagaaattaccgaggctaatgcagaggatgtttacaaaaagaattttggcgatattgatcctacctggctggcaatgccagaatatctgaaaagttattataatcttagtgatgaagagctcagccaatttattcgaaaatatccaaacaatgaactaaatactcagaaaatacatttattaaaaatcaataaaattattttattatcacgatctgtaaacctgccatttgtaaaattagatgaaatcattccagaacagagtattaatccatcggtattaggaaaaatctttctagttaaatactatatgcagaaatacaacattgatactgaaactgccttaatactatgtaataattccatttcacaatattcctatcgtaatcaacctagccaatttgatcgcctatttaataccccaccactcaacgggcaatgtttcgttaccgaagacaccaatattgacttaaatctgaacagtaccgataccgataactggcacaaaacagtacttaaacgtgcttttaatgtcgatgatatttctctttatcgattgctccatattgctaatcatgaaaataaagatggtaaaattgctaataatataaaaaatctttccaatctctatatgactaaactactggcagatattcaccaattaacgattgatgaactgtatttactcctgatgactatcggtgaagataagagagatttatataccattgatgataaagaactggagaaactcataaacagactcgatagcctaagcaattggctgcgtacacaaaagtggagtgtctatcagttatttttgatgaccaccaccaactatgacaaaacgctaacgcctgaaattcaaaacttactcaatacggtctacaatggtttacaaaactttgatgaaaataaaaaagatcttttgactaccatatcgccttatattgccgcaacgctacaattaccgtctgaaaatgtcgcacattctattcttctctgggctgataaaataaaaccaagcgaaaagaaaataacaacagaaaaattctgggactggttacaaaataggggaattttagaattatcaaaaccgccagaaatgcaggaacaaattattcagtactgtcactgtctggcacaattaacaatgatttatcgttcttccggtattaatgaaaacgctttccgcctgttcatagaacaaccaaccatttttggcatttctgatgaacctgataaagcgacaccagcccataatgcaccaacattaatcatcctaacccgctttgctaattgggttaacacactaggtgaaaaagcctctcctattctaaccgcttttgaaaataaaattttaaccgcagaacaactggctaatgccatgaaccttgatgctaatttattagaacaagccagtattcaggcgcaaaattataagcaggttactaaagaaaatacattctccaattggcaatccatcgatattattctgcaatggaccaatgtagcaaatgattttaatatctccccgcagggtatttcatccctgatagcattggattatatacaaccgtctcaaaaaacaccgacctattcccaatgggaaaacgcagctatggtattaactgccgggttagatactcaacaaatgaatactctacacgcatttctggacgaatctcgcagtactgcattaagcaactattatattagcaagattgctaaccgggcagcagcaattaaaagccgtgacgatttataccaatatttactcattgataaccaagtttctgctgcaataaaaactacacgcattgccgaagccattgccagtattcaattgtacgtcaaccgggcgctggaaaatatagaaacccatgccatttctgatgttattactcgtcaattttttatcgattgggataaatataataaacgttacagcacttgggctggcgtttcacaattagcttactatcccgaaaattatatcgacccgacaatgcgtatcggacaaacgaaaatgatggatacgctattgcaatccgtcagccagagccaattaaatgccgatacggtagaagatgcatttaaatcttacctgacctcgtttgagcaagtcgctaatttggaagtcattagtgcttatcatgacaatgttaataatgaccaagggctgacctactttattggacacagcaaaacagaaattaatcaatattactggcgcagtgtcgatcacagtaaattcaacgatggtaaattcgctgctaatgcctggagtgaatggcacaaaattgactgcgcaattaatccctaccaaagcaccattcgcccagttatctataaatcccgcttatatctgatttggttggaacaaaaggaaatagctaaacaagataaagataataaagtcattactgactattactatgaattaaaattggctcatattcgttatgatggtacctggaatacaccaatagcctttgatgtgaatagcaaaatatcagcattagaactggcaaaatctcaagctcccggactctattgcgcaggttatcaaggggaagatacactactggtcatgttttatagaaaaaaagagaaattggacgattataaaactgctccaatgcaaggattttatattttctccgatatgtcctccaaagagatgaccaatgagcaatgcaactcttatcgagataacggttatacacatttcgatactaattctgatactaatagcgtcataagaataaataaccgatatgcagaggattatgaaatcccttcattgatcaatcatagcaacagccatgattggggggaatataatctgagccaagtatatggcggtaatatagttatcaactatgaagttgcatcaagtgatttaaaaatcaagatttcaccgaaattaagaataattcatgagggaaaagaaggacgagaacgtattcaatgtgatctaatgaagaaatatggcaaactgggagataaatttattatttatacaaatataaataaaaacccaaatcactctaaaaatgaaaaacttatctatcctgtttatcaataccgcaataatgacaaaggatgtttgctgttttataggagcaacacaactggtactataagggcttggttcccaacaactaaagaagaaataaccgcgactacaagtagtaaccaagattgtattatcgatacgattaataatatagatctatttaaagcatatttctatatggaagataaagaaggccagattgccaccgatattagtggagcaacagatatcaacacgggaatctcttctgaaaaggttcaaatcataatcaacgctggcaaagaatactctcttacagcgaataaagatgtctccgttcaaccatcacctagctttgaagaaatgtgttaccaatttaatgctctcgaaatagatggctctagtctgaattttactaacaattcagccagtattgatgtcacctttatcgcactggcagatgatggacgcaaactgggttatgaaattttcaatatccctgttattcaaaaggttaaaaccgataatgctctaacgctttttcatgacaagaatggcgctcaatatatgcaatggggagcctatcgcgttcgtcttaataccctatttgctcgccaattagttgaacgcgccactacgggtattgatacgattctaagtatggaaacacagaatattcaggaaccgatgatggggataggggcttatatagaaatcgttatggataaatataatactgatatccacggcactaataaatcatttaagattatgtatggtgatatttttaaagcaggtgatcattttcctatttatcagggaacattaagcgatattacacaaacgacagtaaaattattcttacctcgtgttgataacgcttatgggaataaaaacaatctctatgtttacgctgcctatcaaaaagcagaaacacatttcattcgattcgttaaagaggataataataaacccgctacattcgacactacctataataatgggaccttcccagggcttgcatcagccagagtaatacaaactttctcggaaccaatggatttcagcggcgctaacagcctctatttctgggaactgttctactataccccgatgctggttgctcagcgtttgctacacgaacaaaatttcgatgaaactaaccgttggctgaaatatgtctggagcccatccggttatattgttcgtggtcaaattaaaaactatcgctggaatgtacgcccgttcctagaaaataccagttggaacagtgatcctctggattccgttgatcccgatgcggtggcacagcacgatccaatgcactacaaagtagccacctttatgcgcactctcgatctgctgatggctcgtggcgatcacgcctatcgccaactggagcgggatacgctgaacgaagccaaaatgtggtatatgcaggcactgcacctgttgggcgataaaccctatctgccgttgagttctgcatggaataatccacgtctggacaatgccgcagacacgaccatacaaaaagcatattcctacgcaataaccaccctacgacaaggcacgcaaacaccagcattattattgcgctccgctaataccctgaccgatcttttcctgccacaaatcaacgacgttatgttgagctactggaacaaactggaactgcgcctgtataacttgcgtcataatctctctattgatggtcaaccgctctatctgccgatgtatgccacaccggccgatccgaaagcgttactcagcgccgccgttgctacgtctcagggaggaggctctcttccacaaccatttatgtccctgtggcacttcccgcatatgttagaaaatgcccgcagcatggtcgctcaactcacacagttcggctccacgttgcaaaatattattgaacgccaagatgctgaggccctaaatgctctgctgcaaaatcaagccaaagagctgatattaacgacgctaagcattcaggacaaaaccattgaagaaatagatgctgaaaaaaccgtactggaaaaatccaaagccggggcacaatcgcgctttgataactacagcaaattatacgatgaagatgtcaatgccggtgaacgtcaagctctggatatgcgaatagcttcccaaagtattaccagcggattgaaaggcttgcacatggctgccgccgcgctggagatggtacccaatatctacggctttgcggtcgggggaacacgctttggggcaattgccaatgccattgctattggtggcgggatcgccgcagaaggtttgttaattgaagcggagaaagtctcgcaatctgaaatatggcgccgtcgtcgtcaggagtgggaaatccagcgtaataatgccgaagcagagatgaaacagatcgatgctcaacttcaatcactaacagtgcgccgtgaagcggcggtattacaaaaaaccagcctgaaaacccaacaggaacaaactcaagctcaactggctttcctgcaacgaaaattcagcaatcaagcgctgtacaactggttacgtggtcggttagctgccatttacttccaattttacgatttagtcgtcgcccgttgtctgatggcagaacaagcttaccgttgggaaaccaatgatacctctgcacgctttattaaaccgggagcctggcaaggaacctatgccggtctgcttgccggagaaaccttaatgttgaatctggcccaaatggaagatgcgcacctgaaacaagaacaacgtgcgctggaagtggaacgcacggtttctctggcgcaggtgtaccaatccttagagggaaaaagctttacattgaaagataaaattgaagcgttgctacaagaagataaagagacttccgtcggtaataacggtaatcaattgaaattaaccaacaatacgctatccgcgacgctaaccctgcaagacctgaaactcaaagatgattacccggaagagatgcagttaggcaaaacacgccgcattaaacaaattagtgtctccttaccgtcactattgggaccctatcaagatgttcaagcggttctgtcttatggtggtgacgccaccggcttagctaaaggttgtaaagccttggcggtctcccacggcctgaatgacaatggtcaattccaactcgatttcaacgatggcaaattcctgccgtttgaaggaatcgatattaatgacaaggggacattaacgctaagtttccccaatgccaccagtaaacaaaaaaccatattacagatgctgaccgacattattctgcacattcgttacactatcctcgaataaccatcacctgccacaggccctaatcagggcctgttattaaaaatcatcttacatgccactgttatttcaattacctgaatagaaaaattatccctattatatagcaggattgaatttaacattggttcactgtaatgcagacaaaataacaattgcacaaattattcaacataacaaaggaagtaaatgacgatgaaaaacattgaccctaaactttatcaccatacgccgaccgtcagtgttcacgataaccgtggactcgctatccgtaatattagttttcaccgcgctaccgcagaagcaaataccgatccgcgtattactcgccatcaatataatgccggcggatatttgaaccaaagcattgatcctcgcctgtatgatgctaagcagactaacaacgccgtacaaccgaattttatctggcagcataatttgaccggcaatatcctgcgaacagagagcgtcgatgctggccgaacaattaccctcaacgatattgaaggtcgcccggtattgaccatcagcgcaaccggtgtccgccaaaatcacctttatgaagataacaccctacccggtcgcctactcgcaatcaccgaacaagcacagacagaagagaaaacaaccgagcgtcttatctgggccggcaatacgccgcaggaaaaagagtacaaccttgttggtcagtgtacccgtcattacgataccgccggactcgctcaactcaacagccttgccctgaccggcgccgttttatcacaatctcaacaaccgctcgtcgataaccaagatgccgactggacaggtgaagaccagagcctctggcagcaaaaactgagtagtgatgtctataccacccaaaataaaaccgatgccaccggggttttacttacccagaccgatgctaaaggcaacattcagcggcaagcctatgatgtggccggtcagctaaaagggagctggctaacattaaaaggtcagaccgaacaagtgattatcaaatcgctgacctactccgccgccggacaaaaattacgcgaagagcacggtaacggcattattaccgaatacagctatgaaccggaaactcagcggcttatcggcattaccactcgccgtccatcagacgccaaggtgttgcaagacctacgctatcaatatgacccggtaggcaatgtgatcaatatccgtaacgatgcggaagccacccgcttttggcgcaatcaaaaagtcatcccggagaatagctatacctacgattctctgtatcagcttatcagtgccaccggacgtgaaatggccaatataggtcagccaaataacccactcccctcccctgcgctacctgctgataacaacacctacactaactacacccgcacctatagttatgaccgtggcggcaatttgatgaaaattcagcatagttcacctgccacgcaaaataactacacgacgaatataacggtttctaattacagcaaccgtgccgtattaagtacactgaccgaagatccaacccaagttgatgccttatttgattcgggaggccatcaaaccaacttattatccggtcaagttctaatatggacaccgcgaggcgaattgaaacaagtcaacagtagcgcaggaaatgagtggtatcactacgatagcaacggcacacgacagctaaaagtgaatgaacaacaaactcagaatatcgcgcaacagcaaagagtcacttatctgccggggctagaactacgcacaacccaacatggcagtactaccacggaatatttgcaagttatcacactcggtaaagctggtcgtgcgcaagtccgggtattacattgggagagcggaaaacccgaagatatcaacaacaatcaacttcgttacagctacgataatcttatcggttccagccaacttgaattagatagcgaaggacaaattatcagtgaggaagaatattatccatttggcggtacagctctgtgggcagcaaggaatcaaaccgaagccagctataaaaccattcgttattcaggtaaagagcgggatgctaccgggctgtattattacggctaccgttattaccaaccgtgggtgggcagatggttaagtgcggacccggccggaaccattgatgggctgaatttatatcgcatggtgagaaataatccggtgacacaatttgatgttcagggattatctccggctaacagaacagaagaagcgataataaaacagggttcctttacaggaatggaagaagccgtttataaaaaaatggcgaaacctcaaactttcaaacgccaaagagctatcgctacccaaacagagcaagaagcccatcaattattgaccaacaatcccggtgtagatactagcccaattaaagattacaccacggatagctcgcaaattaatactgcaataagagaaaaccgtattacatcgatagtgaaagatttagattcctcattatctgccctgcaagatagacaaatacgggtaacttatcgagtgatgacctatatagataattccaagccctccccctggcactctccacaggaaggaaatagcatcaacgttggtgatatcgtttcagataatgcttatttatcaacatcggcccatcgtggttttctgaattttgtgcataaaaaagaaaccagtgaaactcgatatgtcaaaatggcatttttaaccaatacaggtgtcaatgtggcagcaaaatctaagtataataacgaaaatgcggagaaaatatttaagatggatttagatgattcgtggaaaagctttgttgaaaaattgaaaataagagccaatggaccagaagcggggcaagcagaaatactattccccagagaaacaccgttcgaagttgtttcaatgagacatcaaggtagagatacctatgtattattacaagatattaaaccatcagcgattactcataggaatgtacgtgatacttataccggcagctttagatcatccagtacaaattaaattgataaaatagtaattaataaaagatcccctgaactttaattcaggggatttcacaaccaatcattaaaatttcaagaaagtttcattcaatcacgataatatttcattaatccagacaaatggtttaattaatgcaatgataaatatctcagatcaatcctagacaattaaatcggaaatcaataaattcaatggttctttatatttgtgtctaagagtataagcacaatatttcactgatggtgttggatacgatttaaaattcaaaaaggtaatacctttatgaagatcagcagaacagatcgcttcattaggtgtcattaaacttatcgcgatacctgatctcactaaatccaaccgattagagaaatcaggaacagttagcaaagttaaattttggtactcaggtagacaattcagtggaataaagccgtcacattgtttcaagaaagcactattatgctgagccaaaggcaatgtggatataatatcatcagcatgactttccgatcccaaaatatcattagcgatagcaagacgcagcacctgataagttccatctattcttataatattatcgttatcaggataatgttcagtcgtcacatagacggttatatcttctttcattaaagaagaaaatattgcctcttttcttgctgaatcatcaaccagaaaattgttttttatgtaaatatcacgataatgataacgttgcaccgctctttttatcactgccgaaattttattaatatattctccactggtcccaataataagtttgccggcgttcgttaatctctcgcttctccgataatgccagttatcctcaacacgctgcatcctctcatagcacggcaatagctcctgatataaggccatcccttcctcagtcagtttagtccttcccggtaatctttcaaataattggcaacctacacgttgttccagttgatatatgatcctacttaagggagagggagtaatacaaagcgtatccgctgctaaagtgaatgactctcttttcgctgactccataaaatacttcaagttctttgaacaaaatagcatcatatatccttcttattttaactaatcattccatcctaaatagaatggaatattaacaagaaaacattacaacgacttttcttctttgcattatttaacatcaaagtatgcattaactgagattgagttttatcatctttattcttagcagttatcaaacaatttttattattgttgcaaaataaatatacccccaccttatgttacaataataattataaagaaatttgacatattatcattacggaaaaataggcgtgattagctctttaattaaacatttcaattagttgaaaaacactatcatgctcaacatgtaatgattgcaattttaagattaaataaacttaataatttatattagttatcactgaacttcgcttccctcgtacagttcatcatgagaacaacacagcgccatttccagccaactctgattagaaaatcagttgcaaattttgcatctgctttttttgcaacagctatttaaagaaaacagtgagatagtgattctctgagagatcaagatatgcctctttacacctcgcaaactatttctatgcatatctcagctatttctcaaagcctgtacttaatcatctcttcttccgatggaacggaatcattctctgattgatccatgatgtaaaggcaacacggatgtttcatttactttatgatttaaaaggaataaatatgaattcgcctgtaaaagagatacctgatgtattaaaaaaccaatgtggttttaattgcctgacagatattagccacagctcttttaacgaatttcaccaacaagtatctgctcacctctcttggtccgaagcacacgacttatatcatgatgcccaacaggcccaaaaggataatcggctatatgaagcccgtattcttaagcgcgcgaatcctcaattacaaaatgccgtacatcttgccatcatcgcccctaatgtcgaactgataggctataacagccaatttagcggtagagccagtcaatatgtcgcaccgggtaccgtttcctccatgttctcccccgccgcttatttgactgagctttatcgtgaggctcgcaatttacacgccagcaactccgtttattatctggatacccgccgcccagatctcaaatcaatggcgctcagccaacaaaatatggataccgaactttccacgctctcgttatccaatgagctattgttggaaagtattaaaactgagtctaagctggataactatactaaagtgatggaaatgctctccactttccgtccttccggcgcgacgccttatcacgatgcttatgaaaatgtgcgtgaagttatccagctacaagatcctgggcttgagcaattaaatgcatcaccggcaattgccgggctaatgcatcaagcctccctattgggtattaacgcctcaatctcacctgagttgtttaatatcctgacggaggagattaccgaaggtaatgctgaggaactttatgagaaaaattttggtaatatcgaaccggcctcactggctatgccggaatatcttaaacgttattacaatttaagtgatgaagaacttagccagtttattggtaaagccagcaattttggtcaacaggaatatagtcataaccagcttattactccagtagttaacagcagtgatggcacggttaaggtatatcggattacccgcgaatatacaacaaatgcctatcaagtggacgtggaactgtttcccttcggtggtgaaaattatcggttagattataaattcaaagatttttggaatgccacttatttatccatcaagttaaatgacaaaagagagcttattcgaactgaaggcgctcctcaggtcaacatagaatactctgcaaatatcacattaagtaccactgatatcagtcaaccttttgaaattggcctgacacgagtacttcctaatactaattacgcctatgccgccgcaaaatttaccgttgaggaatataaccaatactctttcctgctaaaactcaataaggcgattcgtctatcccgagcaacagaattgtcacccacgattctggaaggtattgtgcgcagtgttaatcagcaactggatatcaacacagaagtattaggtaaagtttttctgactaaatattatatgcagcgttatgctattgatgctgaaactgccctaatactctgccatgcgcttatttcacaacgttcatataataatcaaactagccagtttgatcgcctgtttaatacgccattactgaacggccaatatttttctaccggagatgaagagatcgatttaaatccaggtagtaacggtgattttcgcaaaaccatacttaagagagcatttaatatcgatgatgtctctctctaccgcctgctcaaaattactgaccataataataaagacggaaagattaaaaataacctaaaggatctttccaatttatatattggaaaattactggcagaaatccatcaattaaccattgatgagctggatttattattggttgctgtgggtgaaggagaaactaatttatccgctatcagtgataagcaattaactactctgatcagaaaactcaataccattaccggctggttacatatacagaagtggagcgtgttccagttgtttattatgacctccaccagctataacaaaacgctaacgcctgaaattaagaatctgctagataccgtttaccacggtttacaaggttttgacaaagacaaagcagatttactacatgttatggcaccctatatagcggctaccttgcaattatcatcggaaaatgtcgctcattcagtgctgctttgggcagacaagttaaagcccggcgacggcgcaatgacagcagaaaaattctgggactggttgaatactcagtatacgccgggtttatcggaagcagtagaaatgcgggagcatatcgttcagtattgtcaagctctggcacaattggaaatggtttaccattccaccggtattaacgaaaacgccttccgcctgtttgtaacaaaaccagagatgtttggcacttctattggggcagcccctacgcatgatgcgctttcattgatcatgctgacgcgttttgcggattgggttaacgcgctaggcgaaaaagcctcctccgtattagcggcattagaagctaatactttaacggcagaacaactggctgacgctatgaatcttgatgctaatttgctgttgcaagccagtactcaagcacaaaatcatcaacatcttcctccagtaacacaagaaaatgctttctcctgttggacatcgatcaataccatcctgcaatgggttaatgttgcacaacaattgaatgtcgccccacagggcgtttctgctttagtcggactggattatattcaatctaagcaaaaaaccccaacctatacccagtgggaaaacgcggcgggaatattaaccgccggattgaattcacaacaagcggatacattacacgcttttctggatgaatcccgcagtgccgcattaagcacctactatatccgtcaagtcgccaaaccagcggcggccattaaaagccgtgatgacctgtatcaatacttgctgattgataatcaggtttccgctgcaatcaaaaccacccgaatcgccgaagctattgccagcattcaactgtacgtcaatcgggcgctggaaaatgtggaagaaaatgccgattcgggggttatcagccgccaattctttatcgactgggacaaatataataaacgctacagcacttgggctggtgtttctcaattagtttactacccggaaaactatattgatccgaccatacgcatcggacaaaccaaaatgatggacgcattactgcaatccgtcagccaaagccaattaaataccgatacggtcgaagacgcctttatgtcttatctgacgtcgtttgaacaggtagctaatcttaaagttattagtgcatatcacgataatattaataacgatcaagggctgacctattttatcggacttaatgaaactgatgccggtgaatactattggcgtagtgtcgatcacagtaaattcagcgacggtaaattcgcggctaacgcttggagtgagtggcacaaaattgattgcccaattaatccttaccgaagcactatccgccctgtgatgtacaaatcccgcttgtatctgctctggttggaacaaaaggagatcaccaaacagacaggaaatagtaaagatggctatcaaaccgagacggattatcgttatgaactgaaactggcgcatatccgttatgacggcacttggaatacgccaatcacctttgatgtcaatgaaaaaatatccgagctaaaactggtaaaaaataaagcgcccgggctctattgtgccggttatcagggtgaagatacgttgctggtgatgttttataaccaacaagatacactagatagttataaaactgctgcaatgcaagggctatatatctttgccgacatggcatccaaagatatgaccttaggacagagcaatgtttatcgggataacagttataaacaatttgatactaatagtgtcagaagagtgaataaccgctacgcagagaattatgaaatcccttcatcggtaaatagcaataacagttatggcaggggagaatataacctcagtatggtgcatggcggagatatcccaattatccgttaccaagcctcatcaagtgatttaaaaatccatatctcacctaagttaagaattacctatgaaggagctgatgagcgaactcgtaatcagtgcaacctgataaaaaaatatggcaaattgggtgataaatttattatctataccaatctgagtgtcaatacacaatggacatcaaataaaaagttaatatacccggtttatcaatatagaggaaacaccactaataatagtcagggtagattactgttttatcgggataaccaaattggtaaagtaagtgtctttcttcctaattggggacaaagcctatattcagaagttaccaatagcaataatggctatattatagacacttctaatcaagaacctttatttaaacaatatctctatatggaggacaaaaataatggattccgtattattgctactgatgtctataacgcagtagagatcaacactgcaatttccccggcaaaaattcaggtaacagtaaaagccggtagcaaagagaaaacttttaccgcggataaagatgtttccgttcagccatcacctagttttgatgaaatgtattatcaatttaataccctcgaaatagagggtactggtttgaattttaataataacttagccagtattgatgtcacctttactgcattggcggaggatgggcgtaaactgggttatgaaagtttcagtattcctgttactcgcaaggtgagtaccgataatgctctgaccctgcaccataatgaaaatggtgcgcaatatatgcaatggcaagcctatcgtactcgcctgaataccctatttgcccgccagttggttgcacgagccaccaccggaatcgatacaattctgagtatggaaactcagaatatccaagagcctgttttatggagtgataattttactgcaacattaccaatatacaactcaagtcttcatggcaacagcaaaaatatcaaaattatgttaggaaacagtgaaaaacaacctgatcaagcaaatgtcatttatcagggtgagctaacagataaaaatcaattaattaatctctctgaaacttatatatccataaaagagcggagtaacaatacaaaaccagtggataataaagggaacgatagctggatttatttatttgtaaaatattctactaatccaataaaaattggcgagttttggtttaaaaatggtacgaattttcaaggttattatcccaaaggtaatgaaaaaaaccgtgatcctattttcatagaaaatcaaaaaactgaaccaatggatttcagcggcgctaacagtctttatttctgggaactgttctactataccccgatgctggttgctcaacgtttgttgcatgaacaaaactttgatgaagccaaccgctggctgaaatatgtctggagtccatccggttatattgttcacggccagattcagaactaccagtggaatgttcgcccgttactggaagacaccagttggaacagtgatcctttagattccgtcgatcctgacgcggtagcacaacacgatccaatgcactacaaagtctcaacctttatgcgtactctcgatctgttgatagcacgcggcgatcaggcttaccgccaactggagcgggatacgcttaacgaagcgaagatgtggtatatgcaagcgctgcatctattgggcgacaaaccttacctaccgctgagtacgacatggaataatcctcgactagacagagccgcagatattactactcaaaatgctcacgccagctcaatagttgctctgcggcagagtacaccagcacctttagcattgcgcagcgccaataccctgaccgatctcttcctgccacaaattaatgaagtgatgatgaactactggcagacattagctcagagagtatacaacctgcgtcataacctctctatcgacggtcaaccgctatatctgccaatctatgccacaccggcagatccaaaagcgttactcagcgccgccgttgccacttctcaaagtggaggcaaactaccagagtcatttatgtccctgtggcgcttcccgcacatgctggaaaatgcacgcggcatggttagccaactcatccagttcggctccacgttacaaaatattatcgagcgtcaggacgcggaagcactcaatgcgttattacaaaatcaggccgcggagctgatattgactaacctgagcattcaggacaaaaccattgaagaattggatgtcgagaaaaccgtgctggaaaaatccaaagcgggagcccaatcgcgctttgatagctatagcaagttgtatgatgaaaacatcaacgccggtgaaaaccaagctatgatgctacgagcgtccgcagccgggctcaccacggcagttcaagcatcccgtctggctggcgcagcggctgatttggtgcctaacatcttcggcttcgccggcggtggtagtcgctggggagctatcgctgaggcaacaggttatgtgatggaattctccgctaatgttatgaataccgaagcggataaaattagccaatccgaaacctaccgtcgtcgccgtcaggagtgggagatccaacgtaataatgccgaagcagaactgaaacaactcgattcccaacttaaatcactggtagtacgccgtgaagccgccgtattgcaaaaaaccagcctgaaaacccagcaagaacagacccaatctcagctggccttcctgcaacgtaagttcagcaatcaagcgttgtacaactggctacgtggccgattggcggcgatttacttccaattctacgatttggctgtcgcgcgttgtttaatggcagaacaggcttaccgttgggaaatcaatgatgcctctgcaagtttcattaaaccgggtgcctggcaaggaacctatgccggtctgcttgcaggtgaaaccttgatgctaagtctgacacaaatggaagatgcccatctgaaacgcgataaacgtgcactagaagtggaacgcacggtgtcgctagccgaagtttatgctggattgccacaagataaaggtccattctccctggctcaggaaattgagaagctggtgagtaaaggctcaggcagtgccggcagtgacaataataatttggcatttggtgccggtacggacactaaaacctctttgcaggcatccatttcattagctgatttgaaaattcgtgaggattacccgacatctcttggcaaaattcgacgtatcaaacagatcagtgtcaccctgcccgcgctactggggccatatcaggatgtgcaggcaatattgtcttacggtgataaaaccggattagctaacggctgcgaagcgctagcagtttctcacggtatgaatgacagcggccaattccagctcgatttcaacgatggcaaattcctgccattcgaaggcatcgccattgatcaaggcacgctgacactgagtttcccaaatgcatccatgccgaagaaaggtaaacaagccactatgctaaaaaccctgaacgatatcattttgcatattcgctacaccattaaataaccgtccaaacgtactaaaacaggccccgaatcggggcctgtaaggagttttcatgcagaattcacagacattcagtgttgccgagctgtcattacccaagggcggcggggcaattaccggtatgggtgaagcattaacaccaactgggccggatggtatggccgccttatccctgccattacccatttctgccgggcgtggttactccccatcgctcaccttgaattacagcagtggagccggtaacagcccgtttggtctcggttgggactgcaacgttatgacaattcgtcgccgcaccagtactggcgtaccgaattacgatgaaaccgatacttttctggggccagaaggtgaagtgttggtcatagcattaaatgagaacggtcaagctgatatccgcagtgaatcctcattgcagggcatcaatttgggggaaatcttcaccgttaccggttatcgttcccgtttggaaagccactttagctggttggaatattggcaacccaaaacaacaggtacaaccgatttctggctgatatacagccccgacggacaggtccatttactgggaaaaaatcctcaggcacgtatcagcaatccactcaatgttagccaaacagcgcaatggttgttggaagcttcggtatcatcccacggcgaacagatttattatcaatatcgagccgaagatgaaacaaactgcgaaactgacgagttcacagcccatccgaacgcaaccgtccaacgctacctgcaagcggtccattacggtaacctgaccgccagcgaagtttttcccacgctcaacggagatgacccactcaaatctggctggttgttctgtttagtatttgattacggtgaacgcaaaaacagcttatctgaaataccgccgtttaaagcctcaagtctctggctttgccgccaagaccgtttttcccgttatgaatacggttttgaattgcgcacccggcgcttatgccgtcaaatcctgatgtttcaccgtctacaaaccctgtctggtcaagctaaaggggacgatgaacccgcgttggtttcacgtctgatactggattacgatgaaaacgcggtgatcagcacgctcgtttctgtccgtcggataggtcatgaggacaacaataccgtcatctcactgccaccactggagctggcttaccagccttttgagccagaacaaaaagcacgctggcaatcaatggatgtactggcaaatttcaacgccattcaacgctggcaactgcttgacctgaaaggagaaggcgtacccggtgttctatatcaggatagaaatggctggtggtatcgatctgcccaacgtcaagccggggaagagatgaatgcggtcacctgggggaaaatgcaactccttcctatcacgccagctttgcaggataacgcctcactgatggatattaacggtgacgggcaactggactgggttatcaccggaccggggttaaggggctatcacagccaacacccggatggtagctggacacgctttacaccattagatgccttgccgatagaatattctcatccccgtgctcaacttgccgatttaatgggggccgggctgtccgatttagtactgattggccccaaaagtgtacgcttgtatgctaataaccgtgatggttttacccaagggcgggatgtggtgcaatccggtgatatcactctgccgttaccgggtgccgatgcccgtaagttagtggcatttagtgacgtactcggttcgggccaagcacatctggttgaagttagtgcaactcaagtcacctgctggccaaatctgggacatggccgttttggtcagccaattacattgccgggattcagccaatctgccgacaactttaatcccgaccgagttcatctggccgatctggatggcagtggtcctgccgatttgatttatgttcatactgaccgtctggagattttcaagaatgaaagtggtaacagctttgcaaaaccattcacactccgttttcctgacggcctgcgttttgatgatacttgccagctacaagtggctgatgttcagggattaggggctgtcagcctgatcctgagcgtaccgcatatggcgccacatcattggcgctgcgatctgaccaatgcgaaaccgtggttgctcagtgaaatgaacaacaatatgggcgctcatcacaccctgcattaccgtagctcctcccagttctggctggatgacaaagccgcagccttggcgaccggacaaacaccggtctgttacctgcccttcccggtccatactctgtggcaaacagagaccgaggatgaaatcagcggcaataaattagtgaccacgttacgttacgctcacggcgcttgggatggacgtgaacgggaatttcgtggctttggttatgttgagcagacagacagccatcaactcgctcaaggcaatgccccggaacgcacaccaccggcactcaccaaaaactggtatgccaccggagtcccggaggtagacaatacgctatctgccgggtattggcgtggtgataaacaagcgttcaccggttttacgccacgctttactcgctggaaagagggcaaagatgttccggcgacaccggaaaatgatgataatctgtactggttcaaccgggcactaaaaggtcagctactgcgtagtgagctctacgggctggatgacagcgaacagcaaaatatcccctatacagtgactgaatctcgtccacaagtgcgccaattacaagatggcactaccgcttccccggtgctttgggcctcggtcgtggaaaaccgtagttatcactatgaacgtattatcggtgatcctcagtgcaatcaggatattacgctgtccagcgaccaattcgggcaacctctgaaacaggtttcaatgcaatatccccgccgcaatcaaccaacaaccaatccgtatcccgatacactaccggatacgctatttgccagcagttatgacgatcaacaacaactattgcgattaacctgccagcaatccagttggcaccatctaaccggtaatgaactcagagtgctgggattaccggatggtacacgcagtgatgccttcacttacgatgccaaacaggtgcctgttgatggtttaaatctggaagccctatgtgctgaaaatagtctgattgccgatgacaaaccacgcgaataccttaatcagcaaagaacgttctataccgatgggaaaaaccaagcgccattggaaataccgacacgacaagctttaatcgcctttaccgaaacggcggtattaacagaatctctgttatccgcatttgatggcggtatcacgccagatgaattacccggcattctgacacaagcaggatatcaacaagagccttatctgtttccacgcaccggcgaaaacaaagtctgggtagcacgtcaaggctataccgattacggaactgaggcacaattttggcgtcctgtcgcacaacgtaacaccctgttaaccgggaaaacgacgctgcaatgggatacccactactgtgtcatcactcaaacccaagacgcggctggtttgactgtcttagccaattatgactggcgttttctcacacctgtgcaactgactgatattaatgataatgtgcatctcataaccttggatgcattaggacgccctgtcacacaacgtttctggggaatcgaaaatggtgtgaaaacaggttactcctcaccggaagaaaagccgttctctccaccaatcgatatcaatactgccattgctctaaccggaccactccctgtcgcgcagtgtctggtctatgcaccggacagttggatgccactattcagtcaggaaaccttcaacacattaacgcaggaagagcagacgacactgcgtgatttacggattatcacggaagattggcgtatttgtgcactggctcgccgccgttggttgcaaagtcaacaggctagtacgccattggttaatctgttaactaacagcatcggtttacctccccataaccttacgctgaccccggatcgctatgaccgcgattctgggcagcaaattcatcagcaagtcgcattcagtgatggttttggccgtttgttgcaagcatctgtacggcatgaggcaggcgaagcttggcaacgtaaccaagatggttctctggtgacaaaaatggaagataccaaaacgcgctgggcggtcacgggacgcactgaatatgacaataagggacagacgatacgaacttatcagccctatttcctcaacgactggcgatatgtgagtgatgacagcgccagaaaaggggcctatgccgatacgcatatttatgatccgattgggcgggaaatccgagttattaccgcaaaaggctggctgcgacagagccaatatttcccgtggtttactgtgagtgaggatgaaaatgatacggccgctgacgtgattatgtaattgaacccatattcgctcgtttaatgttaacgagcgaatataaactacattgtgagttctaaatagaggaacaggatattttgttaccttttatttcataagtaataaaatccaattcctgtaaaaatctatcatcgggagcatagagaactatgtgaccggggtgggtgagtgcagccaacaaagaagcaacttgaaagatgacagatatatatactcactatccaagctctcctcgcttcccaatgacatatcaagaccatgaaatatagatgaaccattatcatgtgaatgtctacttggtgaaatattactagctaaccaccgaccattagaaaattgcataccatcattgacatatcaaatcagccaaccacttgttctcccaatagttggccgatcacaccggttatctgaaaccttaattaccatcaatacaatctcaaaaattaccaaagcgtttgcattaataacatcacgataaatcactttccttaacttatttagtgatataaggtcgtttagttgttgccgtaacttaaattattttgaagattaacaccatctaaggagttaaaatatgagcagttatcgttctgaaattgacaaaaaaacaccattaatcagtgtattggataacaggaggttaaatgtacgtactttagaatatctacgtactcaagctgatgaaaacagtgatgaattgatcacactctatgagttcaatattcaaggatttgaggtaaaaagtactgatcctcgtaagaataaaaatcagagcggcccgaatttcattcgcgtctttaatctcgcgggtcaggttctacgtgaagaaggggttgatgccggtcgaactatcatcctcaacgatgttgaaggtcgcccggtattaaccatcaatgcaaccggtgtccgccaagactatcactacgaagataacatcctacccggtcgcttacttgctatcaccgaacaggtgcaggcagaagagaaaatgaccgagcgccttatctgggccggcaatacgccgcaagaaaaagagtacaaccttgctggtcagtgtgtccgccactacgataccgctggactcactcaactcaacagcctttctctggctggcgtcgtgctatcacaatctcaacaactgctcgtcgatgatcaaaatgccgactggacaggtgaagatcaaagcctctggcagcaaaaactgagcagtgatgtctataccacccaaaatagcactgatgccaccggggctttacttatccagaccgatgccaaaggcaacatccagcgtctggcctatgatgtagccgggcagctaaaaggctgttggttaacactcaaaggtcaagccgaacaagtgattatcaaatcgctgacctactctgccgccggacaaaaattacgtgaagagcacggtaacggggttatcaccgaatacagctatgaaccagaaacccaacggcttattggtatcactacccgccgtccgtcagataccaaggtgttgcaagacttacgctatcaatatgatccggtaggcaatgtgatcaatatccgtaacgatgcggaagccacccgcttttggcgcaatcagaaagtggtcccggagaatagctatacttacgactccctgtaccagcttatcagtgctactgggcgtgaaatggccaatataggtcagcaaaataatcaactgccctcccctgcgctaccttccgacaacaatacctacactaactatactcgccgctacagttatgatcacagcggtaatctgacgcaaattcggcacagttcatcggctacccaaaataactacaccaccgctatcaccatctcgaatcgcagtaaccgcggcgttctcagtacgctgacaacagatccaaatcaagtggatacgttatttgatgccggtggtcaccaaaccagtttattacccggtcagacactggtctggacatcacgaggagagttaaagcaggtcaataacggttcaggaaatgaatggtaccgatacggcagcaacggaatgagacaactgaaagtgagtgaacagccaacccagaatactacgcagcagcagcgggtaatctatctgccggggctggaactacgcacaacccagaacagcaccacaacaacagaagagttacacgtgatcacactaggtgaagcgggtcgcgcacaggtgcgggtgctgcactgggagagcggtaaaccagaaggtatcaacaacaatcagctacgttacagctacgataatctgatcggctccagccagcttgaactggacaaccaagggcagattattagtgaggaagagtattatccattcggcggcacagcgatgtgggcagccaatagccaaacagaagccaactataaaactattcgctattcaggcaaagaacgggataccaccgggctgtattattacggttaccgctattatcaaccgtgggcgggcagatggttaagcgcggatccggcaggaaccattgatgggctgaatctataccgaatggtgagaaataatccagtaagtttgcaggatgaaaatggattagcaccagaaagaggaaaatatactaaagaggtgaatttccttgatgaattaaaattcaaattggcagccaaaaattcacatgttgtcaaatggaacgagaaagaaagtagttatacaaaaaataaatcattgaaagtggttcgcgtcggtgattccgatccgtcgggttatttgctaagccacgaagagttactaaaaggcatagaaaaaagccaaattatatatagccggctcgaagaaaacagatccctttcagaaaaatcaaaaacaaatctttctttgggatctgaaatatccggttatatggcaaaaacgataaaagatacgatatcagaatatacagaagggcataggtatagaagcaatcatcccgatttttatgcagcaacagatttctttgctttaatggataaaagtgaaaaaaatgattattccggtgaaagaaaaatttatgcggcaatagaggttaaggtttatcatgatttaaaaaataaacaatcagaattacatgtcaactatgcactggctcatccctatacgcaattgagtaatgaagagagagcgctggtgcaagaaacagaacccgctattgcaataaatagagaatataatttcaaaggcgttggtaaattcctggcaatgaaagcaattaaaaaatcattgaaagggcagaagatcaataaaatatcaacagaggctattaatattcgctctgcggctatcgctaagaatttaggaatgcggagagcttcataaatttggtcacataccctatggatttcaagatgcatcgcggcggcaagggagtgcagccaacaaagaagcaacttgaaagatgacgggtatagaactttaaatagaagctaactgtactagctcagactagagctagtacaactcaggtgactgcttcccgccgtaaagagggtttacggcggtttttgctaacaactctgcatactcggattcacttgcgcccgaattttgatgatttttgttctatctgactatggtttgtttagtctcacaattatggcgtcattttggcacacatgttgaattttgttaaaaaaaaatcttaaactagtcaatgaagcaaacttagcatttcactaaaccaatatgttccgctagctccaaataaataatgcaaacgagtagtggatatctatagtgaactaaagaactaataaccgcaatgcggtaggagtaaggcttatgaccacattagcaaatgaaagaatcaccacaagggtgagttcagagaccaaagagctacttgaaagggcgttatcactatcagggtatgcaagtttgaatagctttattgccaatgctgctgtagcagaggcaaaaagactcattgaacaaaatatgcgtattcaattgtgtcaagaagatgcattggcatttgttcatgcattggaaaaaccaatcaaagtaaacgaacgtttccttcgtgctgctcgtagacataaagaaacaataaaaaatgaagatagaacgtctagataaaaacaaacacgatagaaataattttaactgtggtgaacccgcactaaacaactacttgaaggcagtatcgggacaacatgataaaaaggacttatcaagaacattcgtccttacaagtagtcaaaatggatctcaaataaagggatactattccctagcactatgcacggtagagctagacgaactaccagagaaaatatcgaaaaagtccccttctacactacattgcgcacttattggtcgcctagctataagtaagtcatttcaacgccaagggtttggtgaaatattgcttatagatgcaattcgaaaagctatagagtcgtcaaaatctattcctaccccgatgattatcgtcgatgcgaagaacgacatagccaaaaaactgtatatgaacgtagggtttgaggagtttcctcagacaaagagcaaactgttcatgtctatggctgttgcaatggaaatgataaaaagagtagatgcgatgtaacatctcatttactgaatgcggctaacgttccctctgaatgaaaattcagagggaacgctttcactaattacaatacatcaatcgcgttcaattctttgaatgcctgttccagacgggcagccatagaaacctgaccggcacgcagccatacccgtggatcgtagaatttcttattaggtttatctgcgccttctggattacctagttgaccttgcagatagccttcgttcttttggtagtagttgagaataccttcccaagtcgcccattgggtgtcagtgtcgatattcattttaacgacgccgtagctgaccgcttctttgatctcttccgcagtagaaccagaaccgccgtggaaaacaaaatccaggctgttatgtggcagattgaatttctcagaaacatagtcttgagagttacgcaaaatttttggcgtcagtttaacgttacccggcttataaacaccatgaacgttaccgaaagaagccgcaatagtgaaacgtgggctgatagcgttcagtttctcataagcataagcaacatcttccggttgagtgtacagagcagagctatccatatggctgttatcaaccccatcttcttccccaccagtacaacccaactcgatttccagcgtcatatcgatttttgccatacgagccagatattggctgcaaatctcaatattctcttccagagactcttctgacagatcaatcatgtgagaagagaataggggtttacccgtcgctgcgtaatgcttttcacctgcatctaacaggccatcaatccacggcagcaatttacgtgcgcagtggtcagtatgcaggatcacaggaacaccataatgttcagccatctgatgaacatggtgagcaccagaaattgaacccagaatagccgtttgttgaccttcagctttcaaacctttaccggcaataaaagcagcaccgccgttagagaactgaatgataacgggagaacgaactttggcagcggcttccaacacggcattgattgaatcagtacctacacagttgaccgccggtaaagcaaagctgttttctttggctatagcgaacactttttgaacatcatcaccagtgatgacacccggttttacgaaatcaaaaattttagacatgttacgtgggtcctgtttagagcgggcaggcagccaatcagccgctacccgtcatgacttaattactgttttgcacgttcttccaacatcacaaccgcaggcagttttttcccttccacgaactcaaggaaagcaccaccacccgtagagatataagaaattttgtcagcaataccgaacaagtcgatcgctgccagcgtatcgccgccaccggcgatagagaaggcatcactatcagcaatggcgcgcgcgacaatttcagttccttgacggaaattagggaattcaaatacaccaaccgggccattccatagaatcgttttggcgtttttcagaatatccgccagccgttgagcagattcatcccccagatcgaggatctgctcatcatctttaatatcgtgggtagatttcaagattgcttcggctgtttcagagaattctgttgccacacgaacatcggttggcaccggaatatcacagcttatcagcaatttcttcgcttccgggagcaagtcgtcttcatagagagaacgaccgacattatggccttccgcagcaacaaaggtattcgcgataccaccaccgacaatcaattggtcagcaattttagacagcgtatccagaacggtcagcttggttgaaactttagagcccccaacgatagccaccattggacgggctggattatctaacgctttacccaatgcctctaactctgcggacaacaaaggaccggcacaggccactggagcaaacttagccacaccgtgagtagaagcttgtgcacgatgagcagtaccgaatgcatccatgacataaatatcacacagggaagcatattttttggctaaggtttcgtcgtctttcttctcacctttattaaagcgaacattctccagcacaaccagttcaccttccgcgacatccacgccttccagatactctttttccagtcgaacgggggaagataatttctcttctagatagtctactactggtttcagcgagaattcttcactgtattcgccttcagtagggcggccaaggtgagaagtgatcatcactttagcgccctgttttaatgctgcctcaatggtcggtaaggaagcacggatacgcgcatcagaggtgactttgccatcttttaccggaacgttcaggtcagcgcggatcaaaatacgcttacccgccagatctaaatcggtcatcttaattacagacatggtgaatcctctcattgattctctaaattatttaatcttgcgccgtgtgcggatctatatatggaccgtcgatcaacaacaaatcatttgaaacccatagcagccattgctaacgttgtatccaacattcggttagcaaatccccactcattatcacaccagactaatgtcttaatcagatgttgcccactgactcgcgtttgtgtgccatcaacaatcgcgctgtggggatcgtggttaaaatccgttgaaactaacggcaattcggtatagtcaactataccacgaaatgaagtagctgctgatttttgcattaattcgttgattttattaacagttactgaagattttaccgtaacacttaaatcgatagctgtaacgttaatcgttggtacacgcacggagatagcttcaaaacggtcacagaactttggaaaaatccgggttatccctgcggccagcttagtatccaccggaatgatagactgactagcagcccgagtacgccgtaaatctttgtgataagcatcaatcaccggttggtcattcattgaagcatgaatggttgtcactgtacccgattcaatctcaaattgatcatccaataatttaatgatgggaataatgcaattagtagtacaggaagcattggacacaatgcgatcctctgctgtcagtaaatgctgattcacaccataaaccacagtcgcatctaaatcattcccccccggatgagcaaacagcacttttttggcaccactggcaagatgtgcctcaccatcggctctgctgccataaatcccactgcaatcaagaacaatatcaatccccagttcttgccaaggcagcatcgatatatcagattgatgaaacaaacgaatattatcatcaccaacctgcaacacatcattattcagacgcacatcccaagcaaaacggccgtgactagagtcatatttcagcaagtgagcaattccttcggcatctgccagctcattaacagcaataaccgcaatttcagcccgacgcccagactcataaagagcacgtaaaatactacgccctattctgccgaaaccgtttattgccaccttaattgtcatgttactccctgaatatagttattaccacgcaaccgcttagaataaccgactcaatcactgatgtactgactgcttatcacaaaattgccaaaactgcgcgcagaaaaccgcgtcagataacaaaatgaaacgattcagctataaataatgagattacgggaaaaggaaattgatagcaatagtaaaaagtgaccaactcataaaatgaaagattacaaaataatgacctatttattctgggttatttaaaaagaacattcaaagattggcgctcaactcaaacataagtgtattgaagacggctatacccgttatctttcaagttgcctctttgttggctgcactcactcaccccggtcacatcgttatctatgctcccgggggttcgctcccttgccgtcgcgatccatcttgaaatccatagggtatataagctattacacgcccatagccgcctaaaatgaacaggtggtactatgattccaatccagaaatcaaatatttgttccaccatccaccgcaatatccgcaccagtgacaaaatcagcctccttacttgccaaaaagctcacgacggctgcaatatcagttgttgagccataccagccagggacagtaagtctgcgccagaaatcagcattagaaccattgacagggttcatgtccgtatcaatagggcctggagaaatctggttcaccgtgacaccctttccgccaagatcacgcgccagtcctttcgtcaaacctgtcattgccgatcacagtagcggccccatagataaacaataaactcgctactgcccgatcactgtaacccgtaatatctttaagaatgggtgtgaagtaagtgaatgcagcaaaggtagcgccgatgatcaacatgcgcacagggtcgcgggtacggttgatgaaagcgtgtgggatgccccgtttgacaaatacgcgccccccgccgtgacttgatgcaacacaccatcggccataatttccaattcaccatctagtacgaaaaacagctcatcaacatccttatgggtatgtatgggagggccgcttgtcagcggcactagagcatccagcagtgtcatcatgcctccactgctctttgcatcgagcaaaatgtgatactcatcgccactcatccaaaccttggggccactcccagccgacaaataggtgtgccttacatcttctacaacctgcaatggttggttctccacagtcgtactcatcatcatctctctcgctagaaatcggtaacacaagccatttggtcttgtgtattggacgctatttcatctctgatagtcatctgacgggccagtctgaaaatctcgggtatagtattaggcacggcgggactctcgacaccattcacttcaactgtgagtaattgcagccactcatcagccgtcgcaatgaaaatgcctgacgcggtttgaacaatacatccaggcaaattagggacgcctatatctacgccatggggcactattgcagacaaaacaaccaccttggtaccatcggggaggaagaagtgcgctccaggatgacgatatcctgcccggatatgacgctgtaatgtcttcgcatctaagttgaagtcgagcaggtagtcttgctcttgcgggcgaccatagtaagtacgtttactgagatcttgtggtacaccgaccaccatacgactcagtggaaatggtgtcataaattttgagaacaccagagacaagctcttgagctacccaccgccgcaattctgcaatcgctgcttgaaggttctcccgaggaaaagtcaatctcagaatacactgcctctctggccgtgggagcagtttgatgacagccgcagtcacaatcccaagattcgactgtgtgaacagatgcaataaagcaggtccaagcccatacggattgacggcagttttcctggattcatccggccaccaccccactttgactacttcaccatccggtaacacaacctccagcccggcgagatcatcaatccgctgacgacgcagaccaacaccacgatcaagtgcatttccaaccacgctagtgtggccagaggatgccgtaacattcagcatccgatcagtaccgaccaaaaaacgtgcaagttctatctgtgtgaggccggattcaatcaccgcccaccctgatgagcaatcgatctcacgaagcacatttaaacgttgaagatctatcgtgaccacaccgtcggttgccggttgtgctgatcccaatccccagttgcgccccgtgctaatagcgtgcagtccagcatgagtcttgaagcgattaaagatcctaacgatctcctgaacttcctcgatcgttccaggacgaattacagcacgaatgtcacgctgcctaaattggctaacattccgccagcatacagatgatgctgtcactgtaataaaggccccaacagcaccttacagctctgtggatctagtcttgatgaaggatgtggaaccttcaaagtcagaatcttctcgcttgagcgtatttttataaaacctactacaaaaatctatcgcgcttgccaaaattgatcaagatctttatgttatattgactacaaaatatagaagcttatatgaggaaattgcatgtctcgacgagggagaccccccaatttcgaccgggacatcgcactcaaacgtgcgatggaagtattttggtcaaaaggatatgaaggtacacagttagtcgatctcaccgcggctatggacatcaatccaccgagtttttatgcagccttcggaagtaaaaagaacgccttctgcaaagcagtcgacctctacattaagacgatcggtgtccagtcaatgcaagcactcaatgaagcaaaaacagcacgctcagggttgcgcgcgatgctggagagtaccatcaatatcgcctcttctcatcaagctggaggatgcctgcttgtcttgggtgttgtgaacaatctaacggaaaacaaagaagtatgggcttatctcagggatgcacgtaccaaaaccctagatatgatccgtgttcgcctggagcaaggaatcaccgacggtgatctcccacccaatacaaacgtggatgtgttggcgtcgtatttccttggtttgacccaaactatttcattccaagctcgtgacggcgtacctcgtgaacgacttaggcgcttgattgaacccgcaatggcagctattccaggcaactgattcgaataacgattatctccttatcacaaccgtggctatagaaactcagcatattaaagatgcctgtaagcaactacagccaccttcaccgtcagctaccaacagtccacccgctcaatgaccgccttgctacaaataaaggctaaagctcgtcttcatcagtaaggcaaaatctgtcacaaatcacatgtgacacattaatttccctacatcacttgttgaaatattgacatttaaccccgaaaagtggaaactggttgtcgttttttgatgtacttaaggaaaaggaagtaaatcgtgtcaaccgagaaaacttcggcgttcgaggtattcactgagatcacattggcggtatttcggctcaacgccctactgctctctaaaggggatcagctcgttgccccgttgggaatcacgagtgcgagatggcaagtacttggtgcgattgcgcacgcaccacatccacttaccacgcctcagattgccgccgcaatgggtatcacacgccaaggagtgcaaaagcaattgaatctcgggctgagctcagggatggtgaaaaccatcacgaaccctcggcatgaacgctcaccactctatcaactgaccgagcttggtcggcgtacttttgatgcggcgatatcgctggaagctgagtgggtcggatcactggtgcaatccacggatcctaacgagctaaaagtgacattaaacaccttgataagcctggagacgaagctggaagagtcaccagtaccaaatagcactatataaaaatagcactataaaaatagcactacataacatagcgctacataacatagtgctacggattcgttcgttaataacgacaaagagctaccaaacagttaaacgaaatacaacgtggaaacagcatgaattagtggaacacatttgtctctacgttgacacattgttgccgttaaaagccacgtaaatcacgcgactcgcctcggcaggatagcaatacaagcatataccttatagatttcaagatgcatcgcgacggcaagggagtgaatccccgggagcatagagaactatgtgaccagggtgagcgagcgcagccaacaaagaggcaacttgaaagatgacgggtataaatataaacacataattttcaggagatagaaatggtcaagctagaagaaatggacacccacgtaaccctgcgggaacagttattttcgaacaccgatggctccatcgtgctggtgaacatattccatgttgatccctcaatggctgacaccctaatagaaacctggaaggaagatgcagaatatttccggtctaaggtaggactgatttccgcacaattacatcgcggaatcgctggcagcggcacattcatgaactacgccatttgggagagtctggagcgtttccgcgccgcgttcacggaccctgaattcaaggagaaactcgccaagtatcctgatgggattgtcggttcgcctcacgtattccaaaaagtagccgtccctggaatttgcgtggcataagccaaggaaaatcgtcacaatccatcgtcaataacgatatcgtgcagaaaaagagcgcacccgctcaatgtttacctcaggtgcgctcattcatgaatttactgattatttcagcaaagctttagccttagcgaccacattctctacagtgaaaccaaacgttttaaacaactgatcagcaggtgctgactcaccaaatgtatccataccaacgatagcgccattcataccgacatatttaaaccagtaatcggcgatacccgcttcgactgcaacacgtgcagaaaccgcagcaggcagaaccgcttctcggtatgcagcatcttgcttatcaaaagcatcagtagacggcattgagactacgcgcacctgacgaccttcctcagtcaattggtggtaagcactcaccgccaattcaatttctgaacccgttgcgatcaaaatcagttctggttgcccctgacaatctttcaggatgtaagcccctttctcgatattagccaactgctcagcagtacgttcttgctgtgccagattctgacgagagaaaataagtgctgatggacctgctttacgatcgatagcgtatttccacgccaccgcagattcaacctggtcacatggacgccatgtgctcaaatttggcgtcacacgcaaactggcgagctgttctactggctggtgagtcggaccatcttcacccaaaccaattgagtcatgggtataaacaaagatgctgcgaattttcatcaatgccgccatacgcacggcgttacgggcatattcaacgaacatcaggaaggttgcaccataaggcacaaaaccaccatgcagagcgataccattcataatggctgacatgccaaattcacgaacaccataatggatataattacctgcctgatcttcgttcaacggattagaacctgaccacatcgtgaggttacttggtgccaaatcagcagatccccccataaattcaggcaacaccttaccaaaagcttccaaggcattctgagatgctttacgactggcaatattggctggatttttttgcaactgttcgataaatgcttttgattcaacttcccagtttgccggtaactcaccactggtacgacgtttaaattcagccgctaattcaggatacgccttttcataggcagcgaatttttcattccaagcggcttgtttcacattgccagcttctttggcatcccactcagaatagatttccgctggaatttcaaatgccggataattccaaccgagtgcttcacgagtcgcagcaatttccgcatcacccaatggcgcgccatgagaatcatgggtacccgctttggttggcgcaccaaaaccgataatcgttttgcacattaacagagaaggtttatccgtcactttacgtgcttcttcgatagcagctttaactgaatctgcattatgaccatcaacaccgcgaatcacatgccagccatacgcctcaaaacggcttgccgtatcatccgtaaaccagccttcaacatgaccatcaatggaaatgccattgtcatcatagaaagcaaccaacttgcctaactttaacgttcccgccagagagcaaacttcatgagaaatgccctccatcatgcagccatcacccataaagacataagtattatggtcaacgatctcatgaccaggacggttaaattgcgcggccagagtgcgttcagcaatcgcaaaaccgactgcgttggcaatcccctgccctaaaggacctgtcgtagtttctacgcctggagtatagccatactcaggatggcctggggttttagagtgtaactgacggaaatttttcagatcatcgactgaaacatcataaccggtgagatgcaacagactataaatcagcatagaaccatgaccgttagacaatacaaaacgatcacgatcgacccaatgtggatcagttgggttatgattcaaataatcacgccataaaacttcagcgatatccgccattcccataggtgcaccagggtgccctgattttgctttctgcacagcatccatgctcaggaagcgaatagcattagcaagggttttacgagtggtcattttctactccaagtgggataaaaacgtttaggggaataattttctcagcacagcgtgcaaaccgcaatctttaaagccaaatatcaggaaactatcttaatttcatctgaacggcaattctttgatttgccttactgttctacaatgaatttcagcatcatcaacgtaataaacaaactcactgtgcatacaaaggggggaaattaattaaacacagctattagttgcaaatcaagagataaaataaccaattaagaggcaacacattcttaatttatggcaattttcagcaactaaattgattgtttatattgttcccaatcaataggacaatactctcttaatatcaacaaacaaataaacaatttaaaataaaataatacttatggttatattttataatatgatgatatttttacctaaaataataagtaatttaattaacagatatagataaaataaaaaaatattatttttttggcgaattaattattgcaatccattatataatcaggttattttaaatagaacacataaaatagacatatacccaatggatttcaagatgcatcgcggcggcaagggagcgaatccccgggagcatagataacgatgtgaccggggtgagggagtgcagccaacaaagaagcaacttgaaagatgacgggtatacagacaattacttaattaacagtcagggtactttcatgtcaaacatcagaaaaagaccaaataatatcaccccgcaattaatttacatgtgggaaaaaagtaatgagccgtggggcgctaaagatcgccaatcaaaatttatatacgcaaatcctgctttttaccaactgctcaatttgcctgaagatttcgatatttcaggactttcaacggacgaattaccttcacctattgcagaatatacagaagaatattgtcgtcaggatcaaaaagtgatgcaaaccatgaaaacagtcacttcacttgagacgcacctttttggaggaaataaagtcaagcaaacctatcgctgtagtaaatacccactttgcgatgaaaatgggaactgcatcggtatcacgtttcacatgtccaaagcgcaaaacttttcgactgcttactatcatgaaaaatcacctccagcggctttggaatttacaccgcctaacgacatactcacccaaactgaatgggaagttctttttctagcccttcgctcaccggatgaagagagtatcagcaaagaattaatgataagcacagaagatgccgttaatcatattcagtcaatttatcaaaaatttaatctaccactgcatataaaattaaaagatttctgcaaagcaaataagtttgatctatatattccagaaagattcgtcactattggtagccaagagttgtaaatttctattaactcaaatctataggatatataccctatggatttcaagatgcatcgcgacggcaagggagtgaatccccgggagcatagataactatgtgaccggggtgagcgagtgcagccaacaaagaggcaacttgaaagatgacgggtatataaggaacttgattctaccacgactcaactcaatgatatatggaatagaatttctgggtcgtggtttaaaaaaataagaaatttcactgcatttattatgtgaatataaaaccgttaataaattatataaaaaacggcgtaaaagtattcatgagaaattattatttatttaagttattaaattaaaaatatttttcaaataaaataataatactctttacattcaaaaaaaacaccttcaatatataggttatattttcccataaaacaatcgatgccattattcagtattctctccgatagccaattcaattaatattcattgataatctgcacctaatcactaccaaacagcaagacattgataatttatctattatcaatgtttttctcacaattaaaatttggggattatttatggatattcaagactggcatccggcagatattattgcagcactaagaaaacaaggaacaaatctttcagccgtttcccgcaaagccggattagcatcctcgacattgagtaatgcattacatcgcccgtggccaaagggagaggcattaatcgctactgaattgggtttacatccatcggatatttggccatcacgctataagcctggcaaagaaaataaattcctaataagaattgcagaaacaagcactatagaaagctggtagcgtctctatgccttacttcaatgcaatttcaccattgtctattatcgagagattattgaatgatatataccctatggatttcaagatgcatcgcgacggcaagggagcgaatccccgggagcatagataacgatgtgaccggggtgagtgagtgcagccaacaaagagacaacttgaaagatgacgggtataagtacaaatgaaaaagccccgggcaactacccagggcttcggaatctttggcggtgcggacgggactcgaacccgcgacccccggcgtgacaggccggtattctaaccgactgaactaccgcaccgcgcagcgttctggttgagaacgaggtgaatattacgaatccaagatcactccgtcaatattttttataacaaagtggcgcacctgatcaacttttcacccaaaaaggtgatttatcggcaattttatattagctttgtccaagattcatacgccataaacagctcccgcctttcttctccactaaatccaacctggattcatgtgcagcgagctcttcatccgttgcataaataacttttaatgccatttgaggccgggtaatacgctgtatttcagaaacattcgcaccgctagcaatctctccttccattgaaaaggcaagagaagtctgcccgccggtcattatcaaatagacatcagacaatatctcagcatcgagtaacgccccatgtaaggttcgtttagaattgtctatatcataacgatcacataacgcatcaaggttattccttttccccggaaatagccctcttgcaagttgtaagctatcagtaatcttgcagaaatccgcagttggcggaatatcacgattcagtttgccaaactcataatcgataaagccgatatcgaagggagcgttatggataatcaattcagcgccgcgaataaattcaataaactcatctgcaatgtcagcaaacagcggcttatcttgcaaaaattcatcgctgatcccatgcacttcaaatgcttcagggtcgaccaatctatccggctgaatatagacatgaaaatggcgaccggttaaacgacggttaataacctccacggccccaatttcaataattttgtgcccttcatagtgaacacctaatttattcataccggtagtttcggtatcaagaacaacttgtcgtgtaattgccgtgctcataatatctttttatgtcaaacttagggttttgaattgaataagaagagtctaccagatatgggcaagcaggtagaaattttcaccgacggatcttgtctcggcaatccggggcctgggggctacggtgtgttattacgttatcaacaacacgaaaaaacccttagcgaaggtttttatcatacaaccaacaacagaatggagctgatggcagcaattattggtctggaaacactgactcgcccttgcaaaattgtcttaaccaccgacagccagtatgtgcgtcaaggcattacacaatggatccataactggaaaaaacgtggctggcgtaaagcagataaatctcctgtcagcaatgtcgatttatggcagcgtcttgatcaagccattagccgccataacattgattggcaatgggtcaaaggccacgccggacatgatgaaaatgagcgttgtgatgaactggcccgcgccgcagcaaactcaccaacagaaaccgacacgggatatctcgaaaatagagattaattaccgcttccggtaacattttgttacgccaacggcattgcccaatttaggttttaatcgcgtcacttttctctggtttagtgttaatggcagtgtgcgcttgcgagcaataatcagactgacacagcctaatacagacaagtgccgattagaaaaacctgtttcatttcgccagggcaatacttgaaagctgtcacgatacaccacttcataattaagcaagctcaaccaatcaagttggcgcatcatggaaaacatccggctgcaatagggttgatgacgccataatcccggtactaatttccccaaaccaagcagactcaatgaattaaaaccactgataatgagccagccatcatcaatcatcacccggtcaacttcccgtaaaagacgatggggatcagcgctgtaagccaacatatgactcagtaagcaagcatcaacggacttttcttcaaacggcagatggtaaggatcgctaatcacctgcatattcttgccttccctaccgacattaatctgattaaaaatcggacagccattactgtcaatttcagcactcaaattaccgactttcagcagatggaaaccaaatatttttggccaccagggttgtaattggcgctccaaagcggcacggtaatactccccccaaggtaaatcagcccaagaagccgggggatttatattctgtattgtatgtgcagatttcatggcttcttttccttataacccgctattaaaataagaggtatacaatggagcttatcagcattcctgccctttcggataattacatttggttactttgtgacgaaaatagacatgttgtcatcgttgatccggcagaatcacaacctgttcttgataccttggaatctcgtggctggatacccgatgcaattttacttacccatcatcatcacgatcatgttggtggcgtccctggaattattgatcgattccctgagctactagtatacggcccagcagaaacccagagcaaaggtgccaccatcatagtatgtggcggtgatagcatcaattttggtcatttttctttccagatcatcgatgttccaggccacactctagggcacattgctttttatcaagcgccttatctcttttgtggggataccttgttctctggtggctgtggacgtctctttgaaggcaccgctgagcaaatgtatacatctatcggaaaaatagctgagctgcctgatgacacactcatctgttgtgcccatgaatatactatttctaatatgaagtttgctcatgctgttttacctaatcagactatcagcgaataccagcaaaaagtaatcagaatgagggaaaataatcaaccaacaataccaaccacattacaaactgagaaaaaaatcaatattttcttaaaatgtgatgatattgatttacaaagaaatattggcattacacccaactctcaaccgctttccgccgttttccaccaactaagaagacaaaaagatcaattttgattgagagagttgctatatcaaaccaagataagtattattggtcgtcttttaagcaaccataaaaattaattatgaagacaaaagcgattctgttcgcatctgtcttgctggttggctgtcaatcagggcctgattggtcgacgacagccggacaacgggcacagaattcgtcttcaacgagtctaaagaccggcaagatagcaactgataataccaatcagcttgctgcttactggggagagggtgattctggcgctcagcatgagctgtggggatatatccgtgatgagttgaagatgaaaatccctgataactacagggtacgtgaacaacgaaattattacctgaaaaacaagagctatctccacgatgtaactttacgggctgaaccgtatatgtactggatagtcaggcagataaagcaacgcgatatgccgatggaactggtactggtacccatagtggagagtgcttttaacccgcatgctacctcacatgctaaggccgctggtctgtggcagattatcccggatacgggtcgcaattacggtcttactcaagataaatggtacgacgcacgtcgggatgttgccgcatcaaccactgccgccctgaatctgttacaacgcctgaataaaatgttcaatggtgactggttattggctattgctgcttataacagcggcgaaggccgtgttatgcgcgcaataaaagaaaaccagataaaaggtaagccaacggatttctggtcattatcactaccacgggagactgcgctctatgtgcctaaagttctggcgctcagtgatgtcatccgtaatagcgataaatatggcattacgctgccaaaatccaataaccagcgggcacttgctcaaattgatgttggtcaacaaatcacgctgtctcaagccgcagaactggctggcatgtccctgacatcgattaaagcctacaaccctgggtataagcgaggagtgacatcacctaacggcccgcattacatcatgctgccaaaggcaaaagttaatcagtttaaaaactcgctggcaaataaaacagttttgagcaatattcgccaagaagttgctaaaaacaaccaccgactgagtaaacaaagccaatataaagttcgttcaggtgatacattatccgctattgccaagcggtttaatatttccacccgtgaattacagcgcttgaataatctgaaaaccgccagattgttaaaaatcggacaattattaagggtaaataatgacaatgctattatttaccgtgtacgccaaggtgattcaattgccagtatagctaaacgtcatggcatcaatattaaggatttaatgaactggaacgatggtataaaaacaacagatatcaagccaggaattgaactaacgctttatatcaatgaatattatgatgaagcataaaacttttcctgcaactatttgttgttaaataaatataataaatggccctctcttagggccatttcccctattaactgcctatctcaatagggctattttatttgccattttgaacctgggcagtgctcaaaatcctcacgtactacgtgtacgctccggtttttccgcgctgtccgtgttcaaactgcctgcaacaattacgcctattgagataggctcttaatgagagttataaaaatatcattggtaaactatcacatttaataacaaataataaaagcaataaaacatcatcaagtaatttataaaactttcatattaacaatcgattaaaaaaaatgactctattatcgctatttatattttcattatttttcatatataagccatcaaattcttgtaatattcaaaaagtcagctaggatagttagtgaccaatattaattactttgccgaatagttacttaggattttaatcaataaacttgttgatataattatccaaattctaataaaacgaaaaaaaagattaatacactataagaaaacaatataagaataagcaccacatgtaatatcggcaatatacatttcaaagatacaaaaaaataaacaaaagttctgttaccacaactaaggactatcattatgacaacatcatcaacaatgcgaacgccaatcaagctaccaccaatgccatcagaaagcgaagcctcaaaaacatataaatcagcagacatggcacgctcctatctagagggagatgatcttatttttactgacaaagacggctttaaccgagccctccgggatggttttttcctcctgaaagcaccatcatatatggattttgaacacggcgatcgatttgcataccacttctttgaacccgccacagaaggtgaccttcgcccctatacgggattcaaatcatatactttttccaatagttacgaaggttatttcgacagagaacatgatcaatgggaacatttccgcctcgaacgggaaaattggcacctcatgccatcagaggtcgcaacactaggtcaccatatggcacacatcggtatatgtgtactacgctctgtgctaacttatgttggtattcctcgtcgtgattgggaactcattactaatggtatttcagaagggctaagaaaccagatgttatcgtttaaccacttccgatcagagaaagccatccgaggctctaaatttcatcgggattcaggatgggtgaccgtcctaagatcaactgaacgtggccttcttgcctatataaatgatgagcttttagctattgagcctgttccaggatacctaataattaactttggtagttcgatcgaagtgctgacagaaaatttaaccccgaatgttcgagccaatatacatggcgttgctcgcacagaaagaaataggcaacgcgatagaatgtcatatgtcatgtttttagttagcgatctggctggcaatgtctacaaatatggtcccaacggccccatcaacgttcaatctgttaaagagtttgttatccaagaagcgagtcgaacatacgatgatgataatgacgctttgtagatattttctgcacgataaattggtgtaataacgaagatttgagctgacagatacctttatatcggtgtctgtcatatcgattcaaaactaattcggataaaattttttgaaagaatttaataataattgctattgctggaattaaactttctaaaattgtgttttttgttcactgggttcccacaatagtaaaagggtaaaacggtatcatgacgtgaatttacgatttattaaaataaccccaattatagttaaaaaaatacctataaatgttgtaaaaaaaacgatgcttatggaaaaaagataagatattgtggaacctatcaaagggccaataaacatagaaaaaccaacagaaattgacgttaagccaaatattttagccgagttatcattagttgcgaatttctgcatataaatggtaataataatattattcatggacgatcccattcctattattgccattgctaaaaatataaaaaataaattgattttatcaggaaataagtcgttaaattgatttgctattcctattagaagataccccgttccccacaaaaagaatgaagataacatagtatttaaagatatgttaatcttatactttccaaatactaaaccaattaaaacacctgaaatacctgaaagacacatggcaaaactataatggctgccattcaatccctgcgccataaagctaagagctattaagctatctgatagatagccaaaacaagttaaagtggaaataacaataaatgaaaacaatattttattatctttcattatattaaagtaattaattagtgatatcttgttttttttgcgattaacattgatcaacggttctgaaacaaaaatatataagactgctgaaataaaataaagcattgatattaaaataagaatctgttttgttgagtaatagataagaataaaacctaaaaataacggggctaacattttgtatatttgaaataaaacctgccaataactaaagtttttttcaaattgattggttgatatgttttttaatattttaaaattagaaggccctaaaaataaacgcaggatgtttttaataaaagaataaagaatatatatattcatgtcatcaatattgtattgaaaaatggtaataacaccgcaaagtaacgaaatgataataatgtactttttgggttttatattttcatctacaaatgacgaaacatagggcgttagaaatagtaacgatgcagcatatgaaattgtatataacgatgagtatattgctccaccgttccagtgatatgtaattaacgtaaatgatattatcatctccaaatacaaggtgaaagaattccctgaagaggctaatattaatttgcgaaattctttatccattattttcctccaactaaaatagcctcagtaaatatagcggttgcaataattaccttctttttagtatttccaattgaataacatctactattgatttaattactgcatctttagttaatgtgtcagcatcaataattttccaagtgtcatcataaaacgtctggtattgattaagaacgtgtttttggtattctatgaaatcatatttttcatttatctctaattttccagattcactaggttttaatatttctttccttttttcagcaatacttggaggaacatcaagatatatcaccatgtctggttttgtgtttatagatagagccgatttgcttaattttgctaattccgtggatttaagtaagaatcttgctaaatatttataataccaactatcacatataataattttaccttgtaataaacacggttgaataattaaactatctaaaacagcaaaccatgatgctatcaatagaatccaatgccggtcaccaagttcacccaatggagctgaaatgtcataatcccaaaggagatctcgtatttttcccatgtgatacatactatacccagatggcagtaaaggataattcttatctaaaaaaacaatattattataatctagagataagatatcataaacttctcgtgaaattgttgatttaccggcaccatcatttccttcaaaagctataaataaaccgcgtttaatcatttcttttttccccgtagtacgcttcagtatcaagtgaatttctaccactaccgataataaatggtttgaatccatatttttgatataatttatgcatctcaacatatgttttataaatatcttcaaaaataggtctagggtgattttgatattcagaaccatgatcaggatgaaagactgctactgctggaactatgccattttttgaaaaaaattccattccttttactaaatcatttaaaggttctaatcccgctacaaacccaacataaacattgccttcacctaactctgaaacagcagccaggtatgcttctaatagattatttctcccatagtcctgagatttaccaggacatatctgatcaaataatttagggttaaatatttctaaactaatagcccagctatcaacaaactcagaaatcccctttattttatttaagtctctagggggcattgatattagatggctgttaagattattttttttacaaaaaggttttaaagaaactaataattgtttgtgcatttcaaaaccaatatcataattacgagttgtaccaccattgatgagtattcttttatatctactaatgttattagcttctattacattcataacttcaatgacttttgacggtctaatagactttttatgatctgataaactatttctagcttcacctaatgaacaaaatttacactgacggccatcattaaaataataacaatgccctggagagaaaaaacccaaagttgtatcaccgtacaccgtgacgtattcttctactctactgccatctaaaagttccataccatatatatcaggtttaataggaaatataactttaaacaaaatgttaccggattttatataaaaatctccatttttatatattaaatcataatcagagctttcattataattacacgcaataattgtaccatcttctaaaataacttcttgaggtacagaatgtgttgtttctaatttagaactatcacttgttccatacgcccttcttttaggaatgaaatttcgtttactgtattcatatatcacatttttatcatactttaatccagaacataatactctaatttttaattctatagtgttcatttttataccctcattaattctaatattgtatcccctgcacttttagaagaaacagctatgattgcttttttctcaaaaaataaagaatctgtaggtgataggatattataactatttccatcacgagtcattatgtatccccctgactcctcaaggattagtttagctgctgctatatctacacaacgttcgtgacccataagtgataaatctaagaatgcatgtagaacgccactagcgatcaggcatatatctaaacttgaacaagatgagattcttactttatttgcttcattaataattttattctgaacctctgtatactgattatttctcgccctatgaaatgatactctcaaatcgtttagttgaaatgaggggcttgtatatattcgcttactggtatatatgctttgtatataagaaccttctcccaatgatgctttatatataatatctcttggaatatcatatacccagcccataatatatctattattcttgtaaacagctattgatgtagtataggcaggataacccataagcaagttatgagtaccatcaataggatcaattagtaaggaaaccttatctttaatattgacagattgtgattcagaatcgtcttctgaaataatagtgaccttgagttctgatttatctaagtgctcgtaaattatattatttaaaatgatatctatttctactgtttcgccatgatatttgttatcatatccgatatgaatagtggaaagcttagcaagccatattctacgaatctcttctctgagtttgtgaaggtgtatttctaaataattgctaacttcattactgaatacatacctcatgtgacattatctcccaaatagatgagttttttatgccaatcctcggctgttaaatatgctattgtcttttttacatcaaataatctgcctgcataaattgcataatctgacgatgaaaatgctcctaacgtttttggggaaaatgatactttatatatttgcgatttgtacccaactaaatttacaagcatcttgtaagctaactgaatactgcctcctgtataggatttatcaattatcagccaactttcgttttcttttcctttaaattttgggtatatttcattaaataattttcttttatgcagtaaaccactatcattttcacgatgtatttcgcaaaagtatatattcttgtccagtgtttttgcatgataagataacgcaagagggattccccccgaaataataaatagtttgtttttagctatcgtaaaaatcttatcccacaggtaatgatcttggtaaatgttttctatgtttaatgtggggcaagtttccaatgaaaataaattaatacttttactgtattcgtaacgaaactcatcatataaatcaattgttttttgtggagcatcctttaatttcactgacttatcaagccctcttgaatatattaattctaatttatttgttattcctttgtttattatttcggataggattttttctctatttatttttaactcgcatagctcagtaccatataaggctaattctggatctaagccatatccatttactaagttacccatatcagaggtaagtttatttatatttaaataatcaactagttcatcccaaatgtgtattatttcagtgcttgataatcttgacataggtgatgacaaattacttaagtccattaacatttcttctgcatcgcgtagatgaaatattgtttcttgtaattggcatccattatttatttggtttaaatattcttgaaaattattggttttagttccctttaatgttctccagcagtggtgcctacttataatctttattctttccattgcattccccatatgtattattttgttaatgcccctagtctttcgaattccgatatataaaaattagcattttcattagttattccaagtttttccaactctgaaacaacttcaaactctgttttttcattatctattactaaccaaactttatatgcatctgaattaatttcacataatgctttttttgcgaaaagtattaatttcccatccttgcacaggactctataccataaattttttattattggtttattatttttatctgataataaaatatcggatgtattagctattcttttttttgcaaaagatacattgtaaccaaaaatatcttttccttgacaatagtctaaagttaattgccacattttagcaactgagtttatgtaatcaattgttgaaatatcattgattacattaaattttgaacaaatcatcaagtatatagatgttattggatggccttttccaaacatcttcattgcattttgatagcgccactttactaaagtggatgtgtttccacttgaagccagaatataatccattgctgaattaactgttcgttcaaagttgaatgctgctgatattaggtcattatttaaaatatttccaatcccatcggaaaaacacttttctccaaagttttttgctttggtcttaagtatttcacataatttagtcttatttatgtctcctttcaatttgttaaaattatttgactttataatcgattcccctgttaatatcctatgagacaaatgtaatttataccaatcggaatttgaacctccattgttgattatcttcatgatttcttttatctcttttaaagagattattgtcacttctaacattcctatatcggatggtataaatatctcttcgcattctatttccagatctccttccaatataacatagacatcataatcagattttggtgttgcaaacccttcaatgactgaacctgacaagtagcaagtatacagatcagtatcattaaatcttttatttattattactgttatttccctttttacgttaataatgtccatgttttaccttttatcttataaatgaaaggacaaataaaggaataaaggttatggtatacctttattcctttttctattaattaggagatgaattcattaaaccattatcataattcaatgtttcatcattagttagtggcctaaatgcttgtgctgttatcacattcattttatcctcctctaggatttttttgacaaataaactggattaaaatttaattcagcatcctaataataacagtttttttaatttagccatgtgatagttaatatatttgtgggcaccatcacaactaaaaatataacccattgaaaagactgtaaattatttgttgctttttgtgataaaatctgtatcaaacttggtatgctttccaatagattcatttgacataatcatttgaatttattgttattattttttcggtcatgtattcaatacggtgatcatcatgtaaaattctgtcatttattaaagaattcttgatgaacaaaatacacgtttttattatcctttcagtcaccgtattctcgttggcacaaccgaattcatgttgttatccatgattacccctcttgcactcgccttcgggacaaccgcatttgctactcaggaacttgagcgggtatacgatgataataatgatgttttatcgatcacttctctattgaaagcgcctgacatgttaaatttattttctaacaacctgtttccaataaacttctctctataaaaccgggagaacaggataaggtaaacaggtttttctacacacttttcattaatagtcgattcggcaaagatatcagtcaatacgtccattcttaataaacatgaaaaaattctaatccttgaaataagcttcaaagaattttttaacaaaattatattattaatactcttatccccccttctttaagttgcccattacaggtcgattatgaaggttcatcatcataaaattgggaataatttcagtagcaattcaatttataacagaatgaaaatacccgtcatttattttgtacaggatgattatgataaaaaaacataaaactgaaaacattcaattaattaacactaaaaacataatgataatataaattttcctatcaaaatagacaagcagattaatctcccacagagtttaaattcaaaaaataacgctcaatttatatacacaaatataaaatagatattaccaaacaataatttaaataaaacaaatcatttattatcttaatcaaaataaataatcacaacagaacaaataaaaattccgtaaacatttcatcaataaattaccataatataagataatgattttaaagatttttgtgataacattttttccataaaaaacatatcgtatttttcattgtagtcatttgcatttcaattctttctatgccatatattaactatatagataacagacattaattatgtaaatgcatatgtgacgaaattgtcacttatatagctatgaaaaataattataatatcatcttttttttaagaaactgttaatattgagtgaaggtcgatttaattttggcatctatattagaccaagagtggatcaatatttctatcgatatggcaaaaatggtgctctgacacctgtaaagctattcctaaatttccaaaaaagaaagctggtgaaataatttatgaatttaatccaaaagtcgagagcatagaaagtctttttactactttatttaagggccataatcatgaaaacctcatcaacaatgcgagctccaattaaactaccattaatgccatctgaaataactgccgcagaaacttataaatcggcaaacatggttcgatcccgcctggaaggagacaaacttgtttttactgatgaagatgactttgatcgagctatccgacacggtttttttctcctggaagttccaccccatatagattttgaatacggagatcgacttgcataccacttctttgaacctgttacagaaggtgatctgcgtccctatacgggattcaaatcatgtactttttccaacggtttcgaaggttatttcgacagaaaacatgatcaatgggaaaatctctatatcgaacgagcgcactggaacttaattccaaccgaggtcgcgacactgggtcatcatatggcacacatgggtacatgtatattgcgctcagtgttaaatcatgttggtattcctcgtagtgactgggaattagtcacaggtggtctttcggaaggacgagggcatcagatgctagggtttaatcactaccgatcagagaaagctacccggggatctaaatttcatcgggatataggatggataacaatcctaagagcaactgaacgtggactattagcttatatagatgatgagcttttggctattgatcctgttcctggtcacctgataattaactttggtagctcgatagaagtgctgacagaaaatttaacgaaaaatgttcgggccaatatacatggcgttgttcgcacagaacgtaatggacagcgcgatagaatgtcctatgcgatgtttttagacaatagcctggctggtgatctctacaaatatggtcccaaaggtccgatcaaagttcaatccgttaaagaatttgctgttcaggaaattagtcggtcgtatgatgataataacgctttgtagatattcttagcacaataaatcaaggtcataacacagatttgagctgacagatacctttatatcggtgtctgtcaggttaaatcagcaggtgaaccccgatccctctctggctcaccaaatcgtcaaacatatgagaatggatttttaataaccaagctgtcctccaacatctgcccgtgattcatgtcttcactatagagcgtccgacaacctgcaatgaccgcagccgccacaatacaagaatcgtagaatgacaagcgataacgctctgcaataagcctagctcggtcatgaacttcaaccgtaagaggcacgattttgcaaaaactacgtacaatatcgaggaactccgctatctcttcccaactcatcttaagtttacgcacacacacgtgcgccacttcattgagtacctgcacactgatgtcgatgaaaccgcaagacttaacccctaccattcgcttcatctctactgaacttgaaatctgtcggcaacttaccgcggaatgttcgaagacgctccaacaacacctcagatccaggcttcttgcatactgcgaaggtacgcggatcatccactacaatctcaatatcatcaccttcacgcaattccagaatttcaactaagctagctggcagacgtatggcaaggctgttaccccattttgctacttgcatgatattacctccttggatatacacttttactgtatatctactcttgcaaaatacaagcttaaccaaagcatctaacccgaatgtggggaagacttttatcaggtttcctgtagctaaaagaatgtacataagggataaactccgttcttatatccggcatacctaatccgataaattaattctatgctcgctttctttattacggatattactaatgcgcttcccctttttcctttgtaatatttaatactttcacatctgcctaatctggcctgcccccttatatgtatttcacaatagcttttctacgtcactgactcatcacgttttaccgcaaaaaatatacgaacatctatctatacccgtcatctttcaagttgcctctttgttggctgcacttactcaccccggtcacatagttacctatgctcccggggattcgttcccttgccgtcgcgatgcatcttgaaatccatagggtatacatatggagttaaatcgatcttatgaacaaaaaagcacaatattcatccactctggaacaaagcacaaaatacacgtttttatttatcctttcagtcactgtattcttcgttggcgcaaccgaattcatgttgtcatccatgcttacccctcttgcagtcgccttcgggacaacggcgatcggagcatcctggctggtatccagctatgcattttcttacgctctggcagcacctatatttgggtatttttcagatcgtattaacagaagcagattacttatgatttctctgctgtttttcgccgcagatggcctcgctatcactcttgcccccactcttaatatcgcaatcacgctgcgaatttttggcggtatagcatcagcggtaatcatacccaccgtatttgccttgatcgccgatatcattccctataatcgccaagccggagcgatgggtatcgttatgctcggtatgacttttggcattgcattcggtccagctttagccgggatattgacagatttaataaattggcaagcgccgtttttatttagctcacttggcagtgtcgttacattcatcatcgggatctactgcctgccatcaaaaactgcgcctctacagccaacaaaccagcgcttagtctggtttcggcaatggtcggttgtcaggccgatcattgcaaaaggggcgtggaatggcaccggcgtctctgcttttcttttgtctggagaagtcttacgtcaacggtacggatttggccccactgaaatcggtctgactgttgcaacctttggtgttggcttagggttaggtaatctgtccgttggttggcttcgtaagctttgcgatcgagaagaagtgattttagttttggtcagtttgctactgactggtgtgatctcagtttttatgctggttccgcttacgctcctaggttctctaggatgtttaatattctggggtgccgcgctgggcgttggagcgcctgcaagtaccgtcgttttggcaacacgagcaggccctaacaaaggtatggttctggcctttgcagaaacattcaataatctggggattttgtgcttagtgccattagccactatcgggttagtcgcaggaggttcaagctcagcaatggccgtgctattcgtcggattggtcatcggtcttacattgacaatattagattgctagctgacgcgctcggcaaatccttctctatgaatcttccccctctggctttatttccccaccgtacatttgatggggatattgaatagttattgtgtccagagggacatgagtaaattttcagttacaaccagaataaccaagcaaacagagagatgatcgcgatacaggcaatattcagcactatacccactctgaccatttcagtctgtttaatatgaccggagctgaaaacaatcgcattaggtggtgtggcaaccggcaacataaaagcacaggatgccccaaatccgataataagtgtcagcgtcattatcggcatccccaacgcttccgcaacggttgcgaatatcggtactagcaatgctgcactggctgtattactggtaaattcagtcaggaagataataaacgcagctaccgcaacaataatcacaaaccagtggcttgcgccaaaagtcgcggccataccattcgccatgatttcactagcacctgagtttttcaaaatagcgcttaaagtcagaccaccaccaaacagtatcaacaccccccactcggtattattttgaatctgcgaccaactcgctacccccgttataccaatcagaacagcagcactgacagcaataatagtatccagatctttcacacctcctaaggcagagctgataaccgtgctaaagatccagcaaaatacggttaataagaagatcagcatggtcatcagacgtttgccagtccaatccagtttttctagcttcatgtcgaatttatgattcaaattcgggcgcagcatcagatacataacacccaccatcattggcagcagaataaccaccaacggaaccccaaacttcatccaattgaagaaatcgatacccaattgcgccgctgcaatcgcgtttggtgggctccccaccaaagtacctaagccaccgatacttgcactataagccacacccaacagcacaaatacaaacgtatggcgctcagaacgtgcatccagattagacaaaatacccaatactaatggcagcatcatcgcggcagtcgctgtgttactgatccacatggaaaggccagccgtcacaccaaacaacaacatcaccgctacagataaacgtccacgggcaatcatcaacagacggttagctatcagtctgtccaatccttggatgtgaagggccgttgccagagcaaagccaccaaaaaacaggaagataatgggattagcaaaagatttcagcgcatctcccgtattcattaaccccataccaactgccagaattggaatacataatgcagtaatcgtgacgtgaatagcttcagtaagccacagcacaccaacaaatatcattagtgctaaacctgcattagctttttcaccaaacggtaacgtattaagtagaataagtagtagcgcaatatcagcagccagaataattaagccttttttattcgaaaaatttggccttatagctgtggttaaagattcagaaacatccatggtgactccattagcgccggtgatatctgatccaccattgctacaattgttaaaaaaatacaaggcgtgtgaatataaggagtcttctctgggaatcaaatgccattctttaaattttgagatctaaagcgcaataactaatcaattaaatcataaaagacggtatattatacaaattctcgttgttacatcacattattacacctttatagttataggaaatcattacgttttatgcagcttttttgggcacaaaagcagttaaaaaaacgagagggtgttttagcatcaacgatggttaaaaatctggcgaattaacttaccagaaaggttataggcttaacgggtatttaaacattaacaaggccatttttttcatttttcactgatagctttatgatggtaggttttaaactgttattaaaagccactatttaaatttctggttttaatcgtacaaagttttaaccgctttttaaagcccaatggtctttttcgtttcctgaataatatttaatttaaccgttttcattaaactgacacttagtttttccttcttatatttttagatttaaaactaaagagggtaacaggtatgctaatgattttaaaacacccctcattcctttaatcatttttaatgtaattaaataaacttttttattccttttttcgcagctaatcgggttaaccctgttaaatgcttttacttctgttattagattaatgctgtctatacccgttatctttcaaatggcactaaaagcgatcatccacattatttaacctaagagaataggaccacgagctataaaattattttactgctcggttataaacaagagcgaaaatcaatacacacgtcagattttcacacttaattaaaccaattacatgaacagcgaattttttcacattccatattgtaattcttcattaaaaacataattactcattgcgtcgtaaaagtgataaccttacatcgaagtttttacagttttacagttttacagttttacagttttacagttttacagttttacagttttacagttttacagttttacagttttacagttttacagttttacagttttacagttttacagttttacagttttacagttttacagtttaatcatgataggtgaaattatgaaagataaaattatgagtttctctgtaaataaagatctggatgttcattcaaaaagctttgacgccttcatttcatacatggaaaacagcaacgacttttggatcataaaagacaacgaatctcgattcgtctatgcgaatgatattatgctttattacagcggcctccctaagggttttaacatagaaggcaagcttgatagtgaatgtccagcaccgtgggctgagtttgaagatgttatacaagctaatgataaaaacgtaatgacgagtcaaaaaaccattccggtactaaacactttcacttatggcgggagacaaaaaataatccagccattcatggtcgatattacaccgctaatgaaggatgggacatgcattggcattgttggacacggcaaaaaacttgaaatttactccatgtatcattttgaaaataacattcatccagagtcattaacttttggcaaaccaactgatttatttactgatagagagttcgatatagtattttttgcgttgcaatcgctaagcgctaaagatattgccagaaaattaagtattacctatagaacggtacaaagcaggctacatatcatttatcaaaaaatagggataaattcattaagccagttaaaagaatattgcaggggtaagggatatgataactacgctcctacccgatttattaaccctaatccctatatacctctggtataacaatgcgtaacatcactgtcattactatgtcattagggttctgccaagcagaaccttatgctccgcccaaaactcgctcagcaacgcgaagggggattttacgggatacctcacatggaggttatcacagttttacagttcaatcatgataggtgaaattatgaaagatgacactatgagtttctctgtaaataaagatctggatgtttattcaaaaagctttgacactttcatctcatacatggaaaacagcaatgatgtttgggtaataaaagacaaggaacatcgattcatctatgccaatgatactatgattcattacagcggtcttcctaaggattttaacatagaagggaggcttgatggtgaatgtccagcaccgtggtctgagtttgaaaatattatacaagctaacgataacaatgtaatgacgagtcaaaagaccattccggtactacacaccttcacttatgtcggaaaagaaaaaataatccaaccatttctggtcaatgttacaccgctaatgaaggatggagaatgcattgggattgtgtcgcacggtaaaaaacttcaaatttattccatgtatcattttgaaaacaacattcatcccgagtcattaactgttggcaaaccaactgatttatttaccgacagagagttcgatatagtattttttgctttgcagtcattaagcgctaaagacatagctagaaaattaggtattacctatagaacagtacaaagtaggttacaatttatttaccaaaaaatagggataaattcattaagccagttaaaagaatattgcaggggtaaggggtatgataactatgctcctacccgatttattaaccctaatccctatatacctctggcataacaatgcacagcattgctgtcgttactataccattaggattctgtctaaacagaatcctatgcgccgaccgaaactcgcttaacaaagcgaaaagcagttttgtgggatacctcacatgaacgttatcacggttttacagttcaatcatgataggtgaaattatgaaagataacacgatgagtttctctgtaaataaagatctggatgttcattcaaaaagctttgatgccttcatatcgtatatggaaaactgtaatgagttctggtatataaaagataaggaatcgagatttatctatatgaatgattacggacttcatcatagcggactacccaaagggtttaatgttgaaggtaaactggatagtgaatgcccggtttattggtctgagattgctgatattattcaatctaatgatcgtagagtgatggaggaaaaaaaagtcattcctactttgattacatttatgtatggcggtagggataaaattattcaaccatttatggcggacgtcacgcctttgataaaagatggagagtcgattggcgtagtaggcagagctaaaaagctagaaattttttcaatgtatcatatggaaattaataaacctcctgaatcattatcatttggcaatccaactgagatttttacagatagagagttcgatatagtattttttgcgttgcaatcactcagtgctaaagatatagtgagaaaattaagtattacctatagaacggtacaaagcaagttacaatttatttatcaaaaaatagggataaattcattaagccagttaaaggaatattgcagagataaggggtacgataattatgctcctacccgatttattaacacgaatccctatatacctctggcataacaatgaaccacatcgttattatcactataccctatggatttcaagatgcatcgcgacggcaagggagcgaatccccgggagcatagataactatgtgaccggggtgagggagtgcagccaacaaagaagcaacttgaaagatgacgggtatatgccattagggttctgtctaacagaaccttatgctccaaccaaaacgcgcttaacagcgcaaaaagcagttatgtgggatacctcacatggaagttatcacagttttacagtttaatcatgataggtgaaattatgaaagataaaacgatgagtttctctgtaaacaaagatctggatgttcattcaaaaagctttgatgcttttatatcatacatggaaaacagcaacgatctttggattataaaagatagtgaatctcgattcgtctatgctaatgatgttgcactctattacagcgatcttcctaagggttttaacatagaagggaggcttgatagtgaatgtccagctccgtggtctgaggttgcagatattatacaagctaacgataaaaacgtaatgacgagtcaaaaaaccatcccggtactaaacaccttcatttatggagggaaagaaaaaatgatccagccgtttctagctgatcttacaccgctaataaaggatggaaaatgtattggcgttgtaggacacggtaaaaaacttgaaatttattccatgtaccattttgaaaacaacaggcaccctgactcattaacttttggcacaccaactgatttatttaccgacagagagttcgatatagtattttttgcgttgcaatcactcagtgctaaagatatagcgagaaaattaagtattacctatagaacagtacaaagcaggttacaatttatttatcaaaaaatagggataaattcattaagccagttaaaggaatattgcagagataaggggtacgataattatgctcctacccgatttattaaccctaatccctatatacctctggcataacaatgaaccacaccattatcatcactatgctattagggttctgcttggcagaaccttaagccttgtttctctcacattccatccagcatatttcatattgcaattactcattaaaaacataattactaataaaaattttacacaatatagaatattagcatattgaaggtgattacaggaaactgctcctctgtaaaatcatccgcaccaaataggtgcccaaaaactcataaatataattatccattgtgtcgcaaaagtgataaccttacatggagattattccagttttaccgtttaatcatataggtgaaattatgaaagataacactatgagtttctctgtaaataaagatctggatgttcattcaaaaagctttgatgctttcatatcatatatggaaaacagcaacgatttttggatcataaaagatagcgaatctcgattcgtgtatgctaatgatgctacactttattacagtggtctcccaaaggggttcaatatagaaggaagacttgatattgaatgtccaggaccgtgggttgattttgtagatgttatacaagctaatgataaaaacgtaatgacgagtcaaaaaaccattccggtactaaataccttcatttatggtgggagagaaaaaataatccaaccattcctggtcgatattacaccgctaatgaaggatgggaaatgcattggcattgttgggcacggtaaaaaacttgaaatttattccatgtaccattttgaaaacaacattcaccctgattcattaacttttggcaaaccaactgatttatttactgatagagagttcgatatagtattttttgcattacaatcgctaagcgctaaagatattgccagaaaattaagtattacctatagaacggtacaaagcaggctacatatcatttatcagaaaatagggataaattcattaagccagttaaaagaatattgcaggggtaagggatatgataactacgctcctacccgatttattaaccctaatccctatatacctctggcataacaatgaaccacaccgttatcatcactatgctattagggttctgcttggcagaaccttaagccttgtttctctcacattccatccagcacattgcaattattcattaagaacataattactaataaaaattttacacaatatagaatattagcatattgaaggtaattatagaaactgctcctctgtaaaatcatccgcaccaaataggtgcccaaaactcataaatataattatccattgtgttgtaaaagtgataattttacatgggagtttttacaatttaatcatataggtgaaattatgaaagataatacgatgagtttctctgtaaacaaggatctggatgttcattcaaaaagctttgacgcctttatatcatatatggaaaacagcaatgatatttgggctataaaagacaacgaacatcgattcatctatgccaatgatacaatgatttattacagcggccttcctaaaggttttaatatagaagggaggcttgatggtgagtgtccagcaccgtggtctgagtttgaaaatattatacaagctagttgtgatgttgtaatgacgagtcaaaaaaccattccagtattaaacaccttgacttatggtgggaaacaaaaaatgatccaaccatttatgctcaatgttacccccctaatgaaggatgggaaatgcattggggttgttggtcacggtaaaaaacttgaaatttattccatgtatcattttgaaaacaacattcagcctgactcattaacttttggcaaaccaactgatttatttactgatagagagttcgatatagtattttttgcattacaatcgctaagcgctaaagatattgccagaaaattaagtattacctatagaacggtacaaagcaggctacatatcatttatcagaaaatagggataaattcattaagccagttaaaagaatattgcaggggtaaggggtatgataactacgctcctacccgatttattaacacgaatccctatatacctctagtataacaatgaaccacaccgttatcgtcactatgctattagggttctgcttggcagaaccttacaccttgtttctctcacactccatccagcatatttcatattgcaattattcattaaaaacataattactaataaaaatttcacacaatatagaatattagcatattgaagatgattacaggaaactgctcctttgtaaaatcgtccacaccaaagagagtccccttttgaaactgataaacataattatccattgtgtcgtaaaagtgataaccttacatagaagttattccagttttaccatttaatcatataggtgaaattatgaaagataacacgatgagtttctctgtaaacaaagatttggatgttcattcaaaaagctttgacgcctttatatcatatatggaaaacagcaacgatttttgggctataaaagacaacgaacatcgattcgtctatgccaatgatattatgctttattacagcggtcttcctaagggttttagcatagaagggaggcttgttagtgagtgtccagctccgtggtctgagcttgaagatattgtacatgctagtgatggcaatgtaatgacgactcaaaagaccattccggtattaaacaccttcacttacggcgggagagaaaaaataatccaaccatttttggtcgatgttacaccactaatgaaggatggagaatgtattggggttgtggggcacggtagaaaacttgaaatttattccatgtatcattttgaaaacaacaggcatcctgaatcattatcatttggcaacccaactgagatttttacagatagagaattcgatatagtattttttgctttgcaatcattaagcgctaaagatattgccagaaaattaagtattacctatagaacggtacaaagcaggctacatgtcatttaccagaaaatagggataaattcattaagccagttaaaagaatattgcaggggtaagggatatgataactacgctcctacccgatttattaaccctaatccctttatacctctggcataacaatgaaccacatcgttattatcactatgccattagggttctgccaagcagaaccttatgctccggccaaaactcactcagcagcgcgaagggtgattttacgggatacctcacatggaggttatcacagttttacagttcaattatgataggtgaaattatgaaagataacacgatgagtttctctgtaaacaaagatttggatgttcattcaaaaagctttgacgcctttatatcatatatggaaaacagcaacgatttttgggctataaaagacagggaacatcgattcgtctatgccaatgatactatgctttattacagcggtcttcctaagggttttagcatagaagggaggcttgatggtgagtgtccagcaccgtggtctgagtttgaaaatattatacaagcgagttgtgatgttgtaatgacgagtcaaaaaaccattccagtattaaacaccttgacttatggtgggaaacaaaaaatgatccaaccatttctgaccaatgttacaccgctaatgaaggatggagaatgcattggcattgttggacacggcaaaaaacttgaaatttactccatgtatcattttgaaaataacattcatccagagtcattaacttttggcaaaccaactgatttatttaccgacagagagttcgatatagtattttttgcattgcaatcgctaagcgctaaagacatagcgagaaaattaggtattacctatagaacggtacaaagtaggttacaatttatttaccaaaaaatagggataaattcattaagccagttaaaagaatattgcagaggtaaggggtatgataactatgctcctacccgatttattaacccgaatccctatataactctagcataacaatgaaccactccgtcactgttccattagggttctgccaagcagaatcctacccacttccaaaaaaatttttggtttacccgcttttgtaatattacgcctatctggcgatccgcgaaatcaacagaaatatagagaggaatgtcagcacagtacaaaagattaaataatttatacagaaaaattaattatgacaaacatcaaggcaaggagttaatcactccattttaatcatacctgaaactttccacaaaacactagaaaagtttcagatacttaatctcttctcattgactttttttcgagaagtttattttatttcattttgaatatctgcttggccatatttcaaaaggctcacaatttagagcggtagcaatgagtttctcacctttaggccacggacgatgcaaagcatttgataaagtggatgatgcaagccccgcatcccttgaaacagcagctaacgacgttccccgttttttaagccctgcaataatatcagccgggtgccagtcgttttttacaatcattccttattctcctttcagtttggttattcaaggtgctatattcatactttcttcaaatttatatttttatacccgttatctttcaagttgcctctttgttggctgcactcgctcaccccggtcacatagttatctatgctcccggggattcgctcccttgccgtcgcgatgtatcttgaaatccatagggtatatattgttacagcttttcccctgagtccgcactggtgcggaatactaaaaaataactgtactaaaacgttaaatcccgctaagtacagccaaatattctccgaataagaaaatattatatctaacgattaaaagtcataaatgaattttaatcgttaataaatgttcttttatgaatactcgaatatttaaaaagtttagttattttgggaaatgttggaagctgcattaaatacattaatgaatgccctaaaaaagcgcttcaattacgaggaataacacccattaaatactttatgtccatcgaaaaatgacttgtgcaacggcaaatcagccagtcgataattatcgactggctgaatgactgttaacgtgcttcattctgtgccgttaacctatccttaatgcggcaaaaccatctccctcccaataacgccaccccaagttcaagagaagctattgcagctagagtgaggataaacaaggtcttgcccgcacccactaatatccatccacctattgcaggaaatccaaatatccccacaaagtaggcgacaacgaaccaagtgagggcagcgtgacgattctcaagcgcagaatcgtttactgcccatgtttgaataacgggatacaccaatccatagcctattcccgttaacatggccgccaaaacctggaacatggggttaactggtatgcctaacagggccagaatgcccatgattaagaataacatcagcgcgatgaccaatgggatacggggcatcatcgataaacgccgggctaacaaaagccgcgacacaaccacagtcgctgcatgtacagcaaagaatgtacttgcatttgcttgagtcccttcaaccaacgaactttggaacgacatcattccagagaatacgcagcctcccagacctaccatcacaataggacggatcgcactgctggcagcaatcttggttatttttctcacccaaggtctcagtgataactcccgttgaccatgcggttccctgatcccaaaggtcgccagaagtagtgaggcgaggatgccaatgacgccaacaaagagaaacgttgtttgtatgggcactcctgcctgttcaaccgcggcggcgaggaggatgggactgccgcaaattccagccatttgaaacgcgctgaaacgggtaaaccagtggcccctgtcagcatcagtgacacgctctgacaacgccataggcccactgatatagaacattccccaaccgagtccaatcaaaaatgctgcgatacgcgggatgtaactcagttcaccgctgaaaccccctaaaagaaaataaccacaagacatcgccagcgccgcgagggctgcaaggcgtgatgcttccagttgcccggcaaaccatccaaccaaaggaacgccaatcaaagtgccgaccaaggccacgctaagggtcgtcccagtgtcaatgtcactccccccttgtgagcgaaaatacgcggaaataagaaaggtggcaccatatccccccgcagtgaacagggttccgaacaggagaaaaagtgccgacattgttcgcataagtcaaactccatcttaattattacaggacgccgaatggctttggcaccatcgacctcagtttattcaccgctttttccagacggagacaaacatagcgtatctcgtcttcattattaaatcttcctaacccgaagcgcacactggcttgagcctgtgtatcactgacgccgattgccttcagtacatgtgacggtgccctgttagcggatgtgcatgcagacccagaggacaacgcaacttcggaaagctccagcaaaagcgaatcagcatccaaaccgttgaaggagacatttaacagaccgggaaggcattcggtaagatgaccgtttatccgaacgtcagccacattctcgataatatacgaacgaagcaaatcccgtaaataacgtaacctcatcgactcatcaggcaagtttttaaccgacagttcgacggcccgcccgaagcctactatccccgggacgttaagagttccagagcgtaagcctcgctcatgtcccccaccaacgatgagaggagcgagtgttatattcttattacgtgaatcgatataaagtgcaccgaccccctttggtccatatattttgtgcgcagaaaatgaggcaaggctgatattcatgcgctgtacatcaaattttattttgccgagcgcttgcgtggcgtcggtatgaagaggaatgtcatgttccttacagatcgcgcctatctcttcaattttttgtattgaaccaatctcgttgttggcggccataatcgaaacgagataggtatcatctcttattgcacgagatattaaatctggggatacgatgccgtcgctttgcggcggtaaataggtcacctccgttcccattgcttcgagcctactacaacaatcaaggacagccttatgctcaattgtcgatgtgatgacatgcccccttttgccccgatgttgaaggcccgcgattgcaagattgttcgattcggtagaacccgacgtgaatataatatcggaatgactcgtcgcatttatcgatgttgatatcaattttcttgcattatcaacagcttccatagctttccacccaaatgcatggtgattactggcagcatttccataagcgctggtaaaatagggcatcatagtttgaagcacgtcgggatctaatggcgttgtagcattgttatccaaatatatcggccgggttaagttgtacataatttattttccccactaacaaacgaagatgaaattatttttttattatcttgactatatctataccctatggatttcaagatgcatcgcggcggcaaggaaacgaatccccgggagcatagagaactatgtaaccagagtgaatgcagccaacaaagaggcaacctgaaagataacgggtatatatctgctaggcagtaattacatcaccttgactcacctccccctcttcattaacaagattaagacgaatggcggttgaaacaccgagcatatgactgagttgcagcccacgcacataggccaaagctctcgaccaagcgcaatcctcaaagaacacctccagaatagtatctgagcctttgtgatcaccggcagctttctcaaaatactccttcgtaattgctgcacaggtgagtttctgagtcggctcttcgtaagcagcatctgatgtcggtggtttgccgtcagcgaggtttttggacaccatccgccgtgtgatgatttcgggtatttctccagaggctaggatgtggacaaggtgctgcctggctgaatcttcgtgaataacacgtatctcactgagcggaatctgatatttttctgctacgggcaagaagatattcctgatcgaggcgtggagatgactcagacgagggttccgtttttgagaattagtgagattatttatcaggaactggaggcggaatatcccatgatgatcgaacgccacggatatcctcggtaattgaccacattcatcttggcttcgtttggcgaacatcagagcagcctcaaaggctttcaactgagcctcgacaactatctcgctatccttattgagataaactcgtgaattccctgccaatatgcttacgttagtttctcgctgattcattttcatcaatatccttttccaagatggatcgtacgtataaggatgaccgcaaaaatccattaatttttagatcggggaagttctataaagagtggccaatataacgaatggaaaataaggcgatctttataatttcacgtacgttaaatatctttttctcttgcgaccccggttatgaaataaatatgtctgatatcaagcaaaagtataattgccataaaaaagctgagttctgagttctgagttctgagttctgactaaaggttagcgtgtcttttctattaaaaaatagatcttcgtcttgtttaaatgtttttttctttttgaccttgcagtcgaggctctgagtccgaccatcggacatcatttagctctcagcttaccgggtaattctgtcacaccaatacaaggctctagttgccaagtatggatatgtccgaactgttgttgagacagctaactaaaatccgttatatcaaggtaaatcttctcagcaacattaaaggggggattctcgctattaagccatcggcgaaaagtttcatatgtgaaagcatggctgcaccgaccgactgcctcaggaaaactcaaaaattgacgttgtagaagttatcaggctattacctgtatgaaggagggttttacccctcctgtttaattctaatacttaattaattacctattaagcctgaccttttacttctttcaggccatagaaaggagcgcggttacccaaagcttcttcaatacggatcaactgattgtatttagcaacgcgatcagagcgactcatagaaccggttttgatttgacctgccgcggtacctactgccagatcagcaatagtcgcatcttcagtttcaccagaacgatgagaaattaccgccgtgtaacctgcgtcttttgccattttaatcgctgccagtgtttcagtgagagaaccaatctggttgaatttaatcaaaatggagttagcaatgcctttctcaataccttctttcaggatcttagtattggtaacaaacaggtcatcaccaaccaactggattttttcgcccagcacttttgtctggtaagcgaagccttcccagtcagattcattcaagccatcttcaatagaaacaatcggatattttctggtcaaatcttcgaggtaatgagtgaactcttgagaagtgaaagttttaccttcacctttcagttcgtaattaccggtttctgggttgtagaattcagaagcagcacaatccatagccaaagtgacatctttgcccagaacatagcctgcttgttctaccgcttctttaatagcagccagcgcagcagcgttagattccaagttaggcgcataaccaccttcgtcaccaaccgcagtactcatgccttttgctttcagaactttagccaagttatggaaaacttcagaaccgatacgaaccgcctctttcagcgtttttgctccaatcggttgaatcataaattcctggatatcaacgttgttatccgcgtgctcaccaccattgatgatgttcatcatcggcaacggcatagagaatttacccggagtgccattcaattcagcaatgtgctcgtacaacggcatacctttcgctgctgctgcggctttcgcattagccagagaaaccgccagaatcgcattagcaccgaattgagatttattttcagtaccatccaggtcgatcatgattttgtcgatgttagcctgatctttcgcatcctggccgataactgcctgtgcaatcgggccatttactgcatcaacagctttcaatacacctttacccataaaacgggatttgtcaccgtcacgcagttccaacgcttcgcgagaaccggtagatgcaccagagggtgcagccgctaaacccacaaagcccccttccagatgcacttctgcttctacagttgggttaccacgggagtcaatgatttcacgaccgatcactttaacgattttggacattaggttttcctcagtacaagttacatttcaggtgagtgacggaaacacttcataccgtcactcactgcacatcttatttgagctggcctttctggtatttaccggcggctttaacaaaaccagtaaacaacggatggccatcacgaggagtggaagtaaattctgggtggaactgacaagccacgaaccaaggatggtcagggatctcaataatttcgactaatttattgtctactgaacgacccgctacccgcagacccgcatcttcaatacgtttcagtagtaaattattcacttcataacgatgccgatgacgctcaacaatcgtatctgctccatacaaagtgcgcaccaagctatcttttgtcaggtggcatggctgcccgcccacacgcatcgttccaccaagatcactctcttcgctacgcacttctaaattaccgtcttcatcacgccattcggtgatcagaccaacaaccggcaaccggcaatcaggttcaaattctgttgagctggctttttccaagcccgcaacatgacgagaaaactcaatcaatgctacctgcatgccgagacagattcccagataaggaatgttgttctcacgcgcataacgggctgtcatgattttgccttccacaccgcggccaccgaaaccaccaggaaccagaatcgcatccagtcccttcaataattcaacgccacgagtttcaacatcctgggaatcaagcagtttgatgttaaccgtcaagcgatttttcaacccaccgtgcttcaatgcctcaatcacggatttgtacgcatcaggcagttcaacgtatttacccaccatcccaatagtgacttcaccggaaggattcgcttcttcgtaaatgacctgctcccattcggataaatttgcttccgggcaatcaaggctgaatcgtttacaaatataatcatctaagccttgagatttcaatagccctgggattttataaatggaatcaacatcttttagggagataaccgctttttctggcacattacagaaaagggcaatttttgcacgttcgttagcagggataacgcgatctgaacgacaaatcagaatatccggttgaataccgatagagagcagttcttttaccgagtgctgagtcggcttagttttaacttcgccagccgctgccagataaggcaccagtgtcaaatgcaaatataaagtgtgttcacggccaacttctaccgccatttgacgaatagcttcaaggaatggcagcgattcgatatcaccgacagtaccaccgacttccaccagcaccacgtcatgaccttctccaccactgatgatgcgatctttaatttcattggtgatgtgaggaataacttgaaccgtcgcccccagatagtcaccacggcgctctttacgcaaaacttcggaataaactcgccccgtagtgaagttattgcgacgagtcattttagtgcggatgaaacgctcatagtgacctaaatcgagatcagtttcagcgccgtcttcggtaacgaagacctccccatgttggattgggctcatcgtacctggatcgacattgatgtacgggtccagtttcataatcgtgacattgagtccacgggcttcgagtatagccgccaaagaggctgcggcaatgcctttacccagagaggatacgaccccgccggtcacaaaaatataattagttttcatgctgaacctgaaagtttaggtttaaagatgatggatataactaggacgggaaagcagtatacccgaaccttaaatttgccacaaataatctgaacgcaaataaggtattttccaccatactttagccaagaaactcccctaattattatttaaattcatcaggttagtttatttaagaaaaatcgccctactgtaagcaattgaaaatctcagctttgcggttattgcttcttaacctgttgccacattttttccatttcttccaatgtcgccgcttccaaggtgtgaccttgcttcaaaatcagcttttctatttctctaaatcggttctcaaacttattacatgctttttgcaatgcaatttccggcttgtatccaagatgacgggataagttcacaacagcaaacaataaatcaccaatctcttcctccaaatgctgttgatcaaccaccgcctgatgagcctcatccatcacttcgtcgatctcttcataaactttgtctaacaccggccccaaagtatcccagtcaaaaccaaccgcagcacaacgtttctgtattttatacgctttcatcaatgccggcagacttgccggaatgtcatcaaggaccgaatgtagatctttttgcgctctttcctgcgccttacgtttttcccaaccactgatagccacatcactgctgatatcctgctgctgaccgaaaatatgtggatggcggcgttccagcttatcgctaatcgcattacagatatcatcaaaatcaaacaactgttgctctttgcccatttcagcatagaacactacctgaaataacagatcacccagctcttctttcagatcagaaaaatcaccgcgctcaatggcatcaatgacttcataagtctcttctagcgtataaggtgcaatcgttttgaatgtctgctctttgtcccaaggacatccctgctgaggatggcgcaactgtgccataatccccagtaaccgttttatacccgtcatctttcaagttgcctctttgttggctgcactcgctcaccccagtcacagtatccaaattttcccgcgatcagttgccatgaagacgtttagcttcaataacatccggtaactgattgattttcgccaaaatccgccccagtacttgcaggttataaatctcaatattcatatcgatggtagcaatctgctgttttacatcgctgcggctactcaccccaagcacgttcaccttctcattcgccagaatcgtggtgatatcacgcaataatccactgcgatcattcgcaacaacacgcacaatcagtgagtaaccactggaatagctctctccccaaaccgcatccaccaccctttccggcgcatttgcctgcaactcggccagttgttcacaatcaacccagtggatagagatccctcggccacgagtgataaagccgacaatctcatcgccgggaatgggctggcagcaacgggcaatgtgatgcatcaaattacccacaccttctaccacaatccgcccatcatctttagcagaactacgctgtggatgtgatttactctctaaattgcgaagcgcttcccgatctgcatcctctgcggtggttttcttaagtttgctttgtaagaaattgaccaactggttaatacggatatcaccaaccccaattcccgccagtacttcatcaagtgtatggacgttataacgggcaatcagcagcttttccgcctcttttaggctgatatccaagtgctccagttcgttatccagcatctgacgaccggcgataatgtttttatcccgatcctgtttgcggaaccagttgtggattttcgcccgaccgcggcttgtggtgacatatcccaagtttggatttaaccaatcacgacttgggttcgggtgtttctgtgtgatgatttcaatctgatcgcccatttgcaattgatagctgaatggcacaatgcgaccactgattttcgccccaatacaacgatgccccacatcactgtgaatatggtaagcaaaatccagcggcgtggaaccggtagggagatcaacaacatcgcctttcggtgtaaatacatatacccgatcatcaaacacctgactgcgaacttcatccagcatctcaccagaatcagccatctcttcctgccatgcgatcagtttacgtagccatgcaatgcgcccttcatatccgacacgactacccgccgcagccccctctttatatttccagtgggcagctattcccaattctgcatcttcatgcatctgacgagtacggatctggatttccaatgtcttaccacccggcccaagtaccacagtatgaatggattgatagccattcggcttcgggttagcaacataatcatcgaattcatcgggcaaatgacgatagtgagtatgtactatccccaaagccgcataacaatcttgcaaacgttcaaccacaatccgcacagcccgaacatcaaacagttcatcaaatgccagtgattttttctgcattttgcgccaaatgctgtagatatgtttaggacgcccgtatatttcagtagtgacgccctccttgagcatatgcttgcgtaatgtattgacaaagtaatcaatgtactgctcacgatcaattcggcgttcatgcagtaatttcgcaatttttttatattcatcaggatggagataacggaagcagtaatcctcaagttcccatttaagttgaccaatacctaatcggttagcgagcggcgcataaatgttggaacactctttcgcagccagtacacgctcatcttcagtcgcctctttaacttcccgcaaatgggcaatccgctctgccaatttgataatgacacaacgaaaatcttccaccattgccagtagcatccggcgaacattatcaacctgtacagagcagattgaatcgtgatgagtggcttttaactggcgaatggcatccatttccataacacctttcaccagattggtaatcgcgctgccaaacgcctcggtaacggtttcatcaccgagtaatttggcatccattaacgggaacagtaacgccgcacgcatactgtcgctatccatacttaacgtggagaggatctcaaccatctctacaccacgccataacagaagttctgaatcaggatgattttgcgctttttcgtgacaataacgccaggtttcggctaatttctcacccaattgaagattggctatatttaaactcgcgatccacctgtttactgcaaactctcccgcaggggttaaatgagcacttcttaccgcaaccataatctctcccgactacttcataacttctacccaaccacgatctaacgactaaatagcgccattgactccagatgacctgtatgcggaaacatatccagcatccgcacactgataatttgatagccagcctcaagcagaatcttactgtcccgcgccaatgttgttggattacaagagacgtagactactttctctggcaccagctcaacaatgtgtgacatgactcctaccgccccagcacgcgccggatctaataaaaccttgttaaaccccagtttagcccaaggttgatgatgtatgtcagcttccaggttttcatggcagaaagatatgttatccaaattatttattttggcattatattgcccattagccaccaacgtggcaaccccttcgactccgactacagattgcactatgcgaccaataggtaaggtaaaattccccattccacagaatagatcaagcacgttatcattcggttgcaaatcgagccactctatcgcctgagcaaccatttgttgattcacctgatcgttaacctgaataaaatctcttggactgaaaaccagtttcagcccatctacctgataccaaggttccggcagttcattcagtgattcaagtgaagtttcatccgccgccagatagacagcgacattatgttgcacggaaaatgtgcctagtttctctttatcttcccgcttcaagggatcaagatggcgcaatatcatcaatgggccattatctgctagcaccaactccacatgccccaaccgtttaaccgctttcaaactattcagacactgagataatggctgtaataactgttccaattcaggtcgcaaaaccgggcactcttttatagcaactaattcattggattgattttgacgaaatcctatcaccagttggcgctgttttatttgataatgtaaaccaagccttgcccggcgccgataaccatattcagggccaagaatcaccggtttggcagaaaccgttacaccagtttctcgcctaatcaggtgttcgagaacgctggctttactttcacgttgtaaatccggtgcaacatgttgttgctgacaaccgccacatactccaaaatgaggacaacggggattcacacgatatggactgtcagataaacgcttaaccaactttgcttttgcaaactgtcgcttctcttccgttagttgtacctgtgcctgttcaccgggcaataacccggcgacaaaaatagttttaccctgatggcgagctacgccctgcccctgggcatccagattatcagcggtaactgtgatgatatgtcgatttaccgttcgacgattgggggaataaaattgcaccatgattcttacggactatgaattattaagttcttattttcccataatggacgattatgaccaaatatagcttacgcatccgcatgatgagcctgatcctagtgccaattttactggttggcatgtttttcagtatctcatttctctgttatcactatcgtgaactggagaaccaaattgttcgatccgggatcagtattattgaacccctgtcgatcgccagtgaaattggcatcaacctgcataaccgtgaaagcgtcaattcattgatcacccggcttcatcgcagaaattctgagatagttcgggcgattgccatttttaacgatgataatcagctatttgatatctcaaactataaatacaattcagcgcaactacagatctcgccagatatgcctctgccaaccaccctgacaaaaacggaggttaaaaacagtattattttacgtatgcccattatttcagaacaccatctgtcccaaaatcagccgcattctgacaccccatctttacgtccgattggctatattgccattgatcttgatttacggtcagctcacttacagcaatataaagagatcgttatttttatattactcttactcatttgccttggctgggcatcgctgttcgcctaccatttggttcgtaaaatcacaaaacctatcagcgatatcgtcagtactgtcgatagaattcgccaagggcaattaaacagccgtgtcagtgggaaatattttggtgaattagatatgctgaaaaatggcattaatgcaatggcaaaatcgctctccagctataaagaagagatgcaaaatgatattgatcaagcaacgtcagatctgcgggaaacaatggaacaattcgaaattcagaacgttgaactggcaatagcgaaaaaacgtgcgcaggatgcggccagaataaaaacggaatttctggcaaatatgtctcatgaattacgcacaccacttaatggcgtcattggctttacccgccaaacactgaaaacacctttaacaatacagcaaactgaatatctgtatattatcgagcgctctgctaatcatctactgaacattatcaatgatatattggatttttcgcggcttgaagcggataaattggtattggaaaacgttccattccttctacaagatacgattgatgaggtcatggtattactgacactcagcgccaaaagtaagaatattcagctaactcaccatgttgatccccaaataccgaatctggtcgtaggcgaccctacacgcctacagcaaatattcaccaatattatcggtaacgcgattaaattcaccgaccaaggttctgtggagataaagatcaatctgctacaacagaaacaccataaaatcaatttagagattacggtcagcgatacaggtattggtatcagtcctgaacagcaacctcatctatttcaggcttttcatcaagcaaatgccagtatttcccgccattatggcggtaccggcctcggtctggtcattacacggaaactaatccaagaaatgggcggaaatatcagctttaccagtgagccgaaaaaaggttctgttttccgttttgatttatggctaggaaaagacgatttcattctaaccggctcagttgtaccacaaaagacgcttatccatcccccacgtttaccgatgacagtcatggccgttgacgataatccagctaacctcaaactaataggttcattactagacgaaatcgtggaaaaaaccgtgctatgtaacagtggagaagaagctttacagtcagcagcctctcaccattttgatcttattctgatggatattcatatgccaggtatggatggcatctgtacttccaaccacatccaccagctaccgcaacactacagtacaccgatcattgcagttacagcttatacctgccgaccaaagagcgatacacactctccatttgaggatttcctgaccaaacctctcgatgaacatcgtctgagagtcgtgttagatcgctacgttaaaacaccaaaatcacaacatattaactggccattagcactacaacaggccaccggaaaagaaccgttggctatagatatgttgcaaatgttggtagatttactgccaaccattaaaacaatcacagaaaaagttttgtcaggggaaacggtggaaaattaccagcagcagatccataaactacacggtagctgctgttatagcggcgtgccacaacttaaagctctctgccaattaattgaacaacaattacaacaaggtgtccaattaaccgatatagaacctgaattgttggaactgacagatgaaattgatcatgtccttaccgccgcccaaaagatattgagtcgcggctagaacattctagaacattaagtgcacacaataaatttgcgatactcctcataaacataattatctgtcatgccactgatgtaatcctgaataagacgagcgcgataatagaattcgagcaagtctttttcagcttgatcagtggcaacaattttctctactgcttcaccataagccagacgatgcttggtggaaagtttgtgtagcagccgggtttccataaaataatctttgtggaaattgttctgattcagttccacaaaatcctgacggggcattttcaataatgggtagtaaaaatccaatagtccattgatgattctgtacccctgtaactctaatttttcaatctctggatgattaaacactctcttacaagcaatgtttttcaatgtcctaagtaaccgatgctcctcgctcttatcttcaagtagcgcttgattaaatgagccctcaaaaacagccggcaaatgatcaataaaacgacgagccgtataaggaacaagtttgccggtaatataaacccgcagatacataaaaaactgatcctgctggcttcgacgtaattcgttaccgtgagttcccttgtacgccttcctgaccgttaagtcgaatagatccccggcccgatgaccgccattttcttgccactcctgttccaaatatcccatcagtgtatcgacgctgaaaatcgctttttcaacagcatcatccaaatcggcaatgcaataagagatatcatctgctgcttccataatataagtcagtgggaagcgacagaactcacccattttaagctcacgacgtaattcgcaaacaaaatgctcctccgaccaataaaaacctggctttttcatcaaataattaaattgatttggtatttcttcaagacgaaaagcagggcaagtatattttagaatacaaccaagctgggcataagtcagattgagttttaataagctatgcaccatacggatagcctgagcattcccttcaaactgacataaatctttacgcaactggcgacgaaagcgatcttttttcacatcaccacataaacgcaatgcggagatttcacatcgatcttcccgcttaatattttccagggaaaaattaagatcgagctttttggcaaaccaatctttaattgccgcttcaccaaaatgaccaaatggtggattaccaatatcgtgcattaaacaagccatttcaatcaaactttcaaatgataatagccgtttatccaacccgtaatcggccagcaaattacgcgttttcaattcattaataatcgttttcgaaatatagcgcccaacctgttgcacttctaatgaatgtgtcaagcgactgcggacagcggcattattttccagcggaaaaacctgtgttttttgctgtaaacgacgaatagccgctgaattcataatccgcccacgatcgctttcaaattggcgaataacctgctcttcatcattaggatcaacatgatactgacggtatttacgctgatagttaagcttctgactaaagtctatcccggacatttatccctccaacttgtgagatagcactgttttacaccacagattatctgattgttccgtattagatgttaaactcaaacatggaatgattttatatgattaattaatcaacagcgagtatgacatcatgaaagtaggcgtgataggtgctatggaacaagaagtgacgttactgcgcaatcaaattgaagatcgccaaacactgtcacgaggtggctgcgaaatctataccggtaaactcaacggcgtggagatcgcactgttaaaatctggtattggtaaagtttctgctgcaattggtacaactttactgcttgaacattgtcagcctgatgtgattattaataccggatctgccggtggccttgatccgaaattacaaatcggtgatatcgtggtatcccgtgaagttcgctatcacgacactgatgttaccgctttcggttatgaacccggtcaaatggcgcaatgccctgcggcttttgtggcggatgaccagctaattgatctggcagaaaaatgtattcattcactgaatctgaacgcagtgcgtgggctgatttgcagtggtgatgcatttattaacggcgcagaacctctggcgcgtatccgggcgacgttcccacaagtgacggcggtagaaatggaagccgcagcaatagggcatgtctgccatcaatataacacgccatttgtggtggtacgtgctatctctgatgtggcagataaagaatctcatatcagttttgatgaatttcttgccgtggcagctcgccaatctacattaatggtcaacgccatgctggcaacgctgagtaaagataaataatatacccgttatccttcaagttgcctctttgttggctgcactcgctcaccccggtcacatagttctctatgctcccggggattcgctcccttgccgccgcgatgcatcttgaaatccatagggtatatattaccgacacgccctaattaatattttcgggcgtgtttacgggcgatatatttcatgttttaaagagcgtacatctatgaaatggataaaaagcacgggttcaattggattatcgcttttactgtttctcagcagtttcagccattctctgtatgctgctcccttacgggtaatcagtttatctccgtcaacgacagaattagcctatgccgccgggctaggtgacaatctgattgccgccagcgcctactctgattatccccctcaagcccgtaaacttgagcaagtcgctaactggcaaggcatcaatctggaacgcattattacccttaaacctgagctgattctggcatggcgtggtggtaatccccaacgtccactggaacaacttgctgctttcggcattaaaatcttttattccgaccccacaaccaccgaacagatagcgcaggatttagaacgactcgctgaatatagtcctcatccagaacaagcaaaaaaatccgcgactgaacttcgccaacgatttgccaatttgcaacaacaatatgccactacaacccccaaaccggcctttttacaattcggtacttaccctctgttcactacttcaggacagacactgcaaagtgaagtgctttcaatctgtggcggcagaaatatttttgccaacagccctgttccctggcctcaagtcagtcgtgaacaagtactcatcaggaaacctgaaataattgttatcagtggtgggcaagaacaggtcaaattaattgaaaatttctggcatccacaattgcgtgccaaagtcattacattacatgaagattggtttcaccgcgcgggaccgcgcatcattctggcagccgaacagctatgccagcaattgaacgataatggttcctgatcaatcagaaacatttaaaggatgacaaaaatatcccgcaaacaggtcatatgatattcacagacctatcgcgggaaatcgcctgaaatcagatactgaaagaagaaccacaaccacaggttgtcttcgcattagggttggtgacgataaaacgtgaaccttccagaccttcggtataatcaacacaaccgccaactaaatattgtaggctcatcggatcaacaaccaactccacaccctgtttctcaatggtcatatcaccttcatttatttgatcatcaaaggtaaaaccatactgaaagccactgcatccgccaccggtgatataaacccgtaaacgcaagtttgggttttcttcatccgaaaccaagattttcactttgttagccgcggcatccgtaaactgcaaaggtaatacgatatcatcgctcatcatttttactccagactggaactcgacaaaaatattcagaagagaacaaaaatttgccgatcattaataactcgaattatccaatacctgattagttcgttcaagttttgtcatttcaataacacacgaaccgccaaaaagttatcgcgcatttgtttaccatagcggctaccttgagtgacaaacgtgggtcttgtagttaaaccctccattaatcaattaacaattaagaaagaaaaaatattgatttatcatcatgattagttactttattgaatgtttttcaaagtaaccattatggagttcctatgcgaaaaatgttgccactgatgcttgctgtcaccttgacaggttgtaccgctcatagcaaacaagccgatattgacagctatacctcgaaaaaaattaatgaaattatagaaaaccaggtaaaaccgggaaacaaagagaatcccggtgaaataataaaagacgtctcttatcaattcctgggcacaccttatgccgcaaacaaacttattggctcccctactgaacctgaaaaattagttatcgacttcaacggactagactgctttactttccttgattatgtcgaatcgctaaggaaatccaacgaccaaagtgattttgtaaaaaatctcatccagacaagatatatcgacggaaagattcgctttttgcaaagaaaacatttccttacagactggtcaaccagagaaaaattaaatgccaaagatgtaacggatgaaataagttcttcttacattgcaatcacaaaaagcctgaataaaaaggctgatggtagcgaatacatccccggactaggtgttaccaaaagagatatcaaatatattccgggtgataagatcaatgatgcggttattaagaacctaaaaacgggcgattatataggaatatatacccatcttgccggattggatgtcacacataccgggatttttattatgacagatcacggcccaatgctaaggaatgcatcttcacttgctgcgaataaaaaagttgtcgattcaccatttcttgattacgtaaagaataaacccggaattatcgttctaagagcattataatccgaggggcaaacgacaaaccctcttaaaaatagattcaggagcctttcatgagccaatccgacatcctctattctcaggcaaaacaacttattcccggcggcgtcaactctccggtacgtgcatttaatggtgttggcggtactccgctgtttatcaaacatgctgatggcgcttatctctatgatgttgatggtaaagcctatatcgattatgtcggttcctggggacccatggtgttgggacataaccacagcgctatccgtaatgctgttatcaaagccgcggagcaaggattgagttttggcgcgcccaccgccgctgaagtggaaatggcgcaattggtgactgaactggtgccatcgatggatatggtacgcatggttaactcaggtacagaggcgaccatgagtgctatccgtctggcccgtggttacacccatcgcgataagatcatcaaattcgaaggttgctatcacggccacgctgattgcctgctggtgaaagccggttctggcgcattgaccatcggccaacccaactctccgggggttccggttgatttcgtcaaacatacgctaacctgtacctataacgatttgagttcagttcgagaagcgtttgaacaatatccacaagagatcgcctgtattatcgtcgaaccggttgcgggtaatatgaactgcgtaccgccacaaccagaattcctccccggtctgcgtgcgctgtgtgatgagttcggtgctctgttgattattgatgaagtgatgaccggtttccgtgtcgctctatccggtgcacaatcttattacgatgtcgaacccgatataacttgccttggcaaaatcattggtggcggtatgcccgttggcgctttcggtggacgttatgaagtgatggagaaactagcgccaattggccctgtttatcaggcaggaactttatccggcaatccgattgcaatggctgccggtcttgcttgtctgaaagaagtgtctcaacccggtgtacatcagcgtttgactgagctaacagataatctggctgctggcctgacgaaatcagcaaaagcagccaatattcctctggtggttaaccatgtcggcggtatgttcggcattttctttactgatgcagaaaccgtcacttgctatcaggatgtgatgaattgcgatattgaacgttttaaacatttcttccacctgatgcttgatgaaggggtttatttagcgccttctgcatttgaagcgggttttatgtctattgctcacacggatgaagatattcagcgtactgtcaatgcagccgctcgctgctttgccaagctgaaataatttctttgttttcaaataatagcgccgtatttttacggcgctcattcttgccatccttcgaatgggtcacaagattgttcttgctggccccgcgcttctttactcagaaaatcgtcgggaataatagttgttcccttcaatgccgcaaaaaatccagcccaatcgtgtggcttacaggacagtattacatctcctgtctcaggatcttttcgaataaaaacttcatcagagtcaaaccgataagctgctggcaaacgtaccgcttgacgcttcccatccataaacaatttagctttttgactcatacaacctcctgatattgattggaatatcccaaatcctatcacagatcttgatacataaatcaaaagagatttaataatcataaactgataaatcaatttgatgtcacactcaccgctacgattgctactgaaatatcgtaacttgaatcataggctcagcgccgtagtaggcaacaaagacatcaccagaacaatttttgcttatgctaagggaagaagaatttatatacttcgcacatttataaagaaaaccccgaagactccaccgacagaaatcaaactggcattacaaagattagaggaaatgacagatgaaagttaagggtattccattttcagaagtgaaggcgcaagccctctcatcccccaaagctcaggccgcttatgaagctgctaaacaggaagaagaactctacgagctcattcaaaacatgaaacagaaagcaggtattaatagttcgcagttagccgaacgactaggaattactccaccggcagtagctaaggttgaaaaaaacccaatgaaagcaagtattgcaacacttgaacgctatgcagcagcctgtggagtaaatctcaaaattactatcgcataatacgttaatcccaatacctgatatcttaatcaaacttcatggtaaagaatgacgggtatatatatacagcggcatattcgtattcagatgtcacgattagcctcatccctgaggccaatctctttatatctcagaaaaatttaatcataaaactgactgatactctctttttcttggccggatacgatgacgtttaacagtcgttcataatatatagccatcctatcaatgactgcttctgtatacagttccggattgtaatggagttcacacttgatattttgtggcatgtataagaaattcatcccaagtgattcaaaaggaattatttcggtatctatcacttccacctcaagatttggcaatgataatttttcatctttagacatgtcgataaaatcatagaaattttgtgcatccaaatagttaaacagaacgttaaatatattatccctcgccttttcccccaccacgtcaatcacaacagacatgtggatattagcattctctatggcgcgatgaatagactgactaacctgcttaatgatttcttgtaggctcatttcctgattaatattggattttactatcaagtcacccaagaataaccctattgtttgatggctttcgatgcgagttcggtcagcttttggtgaggtaacaataagttgtgattcaccggagtacataaaaagacaagtgtggaacaaagccataaataacatataaggtgtgattttgtgagtttcacaatattgtaaaacagctttatccagcgaatcaggtattttgatatgatgggcatgagatcgatattttgaagccagatgctttctgaaagaaacaggaaaatcgcgttctgaattaacatcagcaaattgttgttgccagaatttaatttgttttttagctacttcagtcacatggatttcttgtaagtcataaacataaccagaatattgcatggcaacgggtggcaatgtgttttcttgcccctgtgaataagcggtatataactgtttaaactcattcataatgatattgacagaccacccatcggaaataatatggtgcacatcaatcaataataccgtgattgtttccgaaacaggcagtagaaatgtcttgattaatggaccattataaacatcaaaaggtgttcttaatttctcttgccagagtttattaatttcaataataatttggtctctctcgattcctcttggtaacgcttcgataacttgaagattgattttcatactgttatcaggctgcatgaaaatttgcccattttcttgataaaacttaaaacgtaaactttcatgtcgcgctaagatggtatttaaacttttttccaacgcactgcgatccaattctcctgccatcagcaaagtaatgggtacgtggaaactgtcctccaacaacgcttcttgcacaaaataccaatacattttctgacaataagaaatcggcatttttccatcaaatgcattgtgatcagatatattgtgtgttgtcttcggtgcagatatttcatgcttatgactgtgacgaatcacacttgcaatctgaacaatagttggatttgcaaacagctcatgcatattgaaattattggttaacgtatttcttatggaagcggttatcttaactgccaagagtgaatgaccaccgagtgagaagaaattatcataaataccaatttgattgatttttagatgttcttgccataactgacagagtttttcctcgatttcatctctcggtgcgatataagcctgacgacgtaaatcattttcattcggaataggtaacgcttttttatccactttattgtttaaattcagtggaatgcgttccaatgggatatagaaactgggcaccatataatccggcagttgttttttcaaagcggattccagtagctctgcgagttctccactaatagcaggaagttgcggataattagctaaatgcgtttggctataacctaaacgtgcctgtacttgaggtaattcaccacggctgaaaatcacatccagtaaatcaagctgctgctgtgaccatgtaagttcacactggtagccgcactgttccgcatattgaagtaaggattcgagggccaaaacttgctctgcggcttctggagaaaaaccgccgacatcttttggtagaaaaataatctgattagatggccaatggcgtagaccttccgctaaatcaaaatcatctttgatacgggcattaggaataccagagacaccaaatgtatcgaatttccctgtctccaacacatgataaagatcttcaatagagttaaaatcgcaccaagttaggggtaaattgcaacataattccgcatttttatcgcacttgtgtaatatcacttcataacgataacgcagcatttcattgtcgccaacaccacgtttaaccaaaatatccactcttccaatttcagggtaacgcgtcggcaattgtgcaaaataggttggactcaataaaaactctttttctttctgtagacgctgttgaatacggtttgccaacgtacccaccgaaatacgttgcccattcaggcgatttttctcgatggctgttacatgtgcagttaacaaatctaaattacggatgtctcctagcagaatttttcccccggatttaaccgcgggtaataactgggtaatgactttttccagatactgaatattggggaagtattgaacaacggaattaatcacaacggtatcgaactgatcaggcgtgatagtgcccaaattcagtgcatctccccttcttagctccacgtgcgaccagccacgctgttgcaaaatcttctggtgacgcgccaatacctccgctgaaatatccgtggctaatactgattcgcatcgtccagcgtaacgatatagcaataagcccgatccacaaccaatttccaataagctgctgggatgcagggattcaatccgccgcatggtacccactcgccattcttccagttggtccaatgcgattggctgttcggtataagtatttatccaaccataaaaatcactattgttatcgctctcatcggtagtatcggtaacaatattttctgttatctcccgccgatactgaccattaaagatctctgtccagctttcaatgtaatcggcattaaaatcggctgctttctccgccagccaattggtactcgggcaaacataagcaatgagtttcctctcttcactgttatgaccatcaacgatcacggcagcattacttaaaatctcctgccccgccagcaccgactcgatttcccccaattcaatgcgatggctgcgaattttgatctgcgaatcccggcggccaatgaattccaactcaccttccagcgtccagcgtactaaatcaccggtacagtaaagtcggtctgccgggttggtactgaaaggatctcggataaactgtttttccgtgatatccggtgcattacggtagccacgcgccagttgcatgccaccaatatgcagttccccgacagcgccaagaggcagcagattaccgtcggcattcaggattcgcatcacggtattcggcaacggttttccaatcgtcactcgcttatttgctgttaataaggcagaggtcacaatcgaagtacactctgttgggccataaacgttaaacagctttctgccctgcgaccactgcgcggcgatatgcggtgccacggcttcccctgccagcaacaaggttgaaactgtgcgccacttgttgaaatccaaatgaggcaacagcgctggcgggagtacggcatggctaatgtggtacttttcaaccatctcatccaaccattcaggcgagcggcgatgtgtttctgcaatcaaatacaatgtagcgccataggccaaggtcattgccatttccaacactgcggcgtcgaagctccaggaagcaaactgcaacccgcgaatatcagcatccgcaccaaataacgcggcttgtgcctgcgccagattcacccaccccttgtgctccaacatcgcgccttttggtcggccggtagagccagaggtataaatgacataggccagatgattttctgtcaggggcaccggacgatgaacgatattgccggtaggcaggttttgtacatataaatgtaccgtttcagcatccagacagataacgcgttgctgactgataggcaatttatcaaccagcggtgtttcggtcaggataacttcagccccgctgtgctccagcatgtattgcaggcgtgcttgcggataactggcatccaaaggcacataagcaccacccgctttgaggatgcccagcagtgcaatcactgtttgcaacgaccggggaaggcaaattgcaaccaaggtatctggctggataccttgctcaatcaggtaatgcgccaattgattggcctgaacattaaccgcctgataacttaaggtttcctcaccaaaaaccagcgcggttttttcaggattcagtgccacctgttcttcaaacagctcatggaagcaacgcccttgtggataatggttctgcggcccatttaattcatgcagtaaaatatgcttttcagcttctgacaataatgggagttcatgaatggagggctctttattgactgagtcatctgtcattacctcaacaatgccagaaagcaaggttgcgtaattggcgataaatctttcaatggtattactatcgaacagactggtatttgaaatccatactatagataattcgtctgtctgttcttcttcaaaaacatggatttccaaatcaaaccgagttgttctgagtaaattatccccgagttcaataatatcatcctgtcccagtattgcgtcacgttggttattctgtactgcaaacatgatctgaaataccggattataatttaagcttcgttccgggctgagcttttccaccaacatctcaaacggcaaagcttgatgttcataagcatctaggatggtacggctgttctgttttaataattcactgaacgtcggctgaccggataaatctgttctaataaccaatgaattaacaaaaaaaccgatcagaggttcaatatcaggatgttgtctgccggcaatagctgttccaaccagaatatctttttcattgctatagcggctcagtaatacggtaaaagccgtttccaggaacataaatagtgtaacgttatgtttggtgcataatgctctaattgcttgggtaagatgtgctgaaatacgctgtagatgaagccgtccttcaatattttgtttttccggacgtggattatccagcggcacacggtggacgggtgaaattccagctaactgattctgccagtatgtcagttgttttttcagcacatcaccttgcaaccaactctgttgccactgggcataatcggcatattgaattctcagcggcggtagcggatttgccttaccctgacaataagctttgtataatgtgaaaaattcatggagaaatattgccatcgaccagccatcgaaggcgatatgatgtatcgtataaataataagataatcatcttctgccaattttattaaccggacgcgcagcatcaaatcggtattcaggttgaaaattagattttcttcttccttactaatttgttttacctgatcgtttttctcagtttcagacaacgcagataaatcatgatctgtaatcggtaaatcataatccgcggcaataaattgccgcggttcattattgatgattttaaaatgggtacgcaggacttcatggcgttcaagtaatgccttaacggctgcctcaaacgcctctatgttaatggattcccgcagcctgaaatcccccatacagttatattggcgactacctccatccagttgatcaataaaccatagtcgttgttgggcaaatgaaagcggataatgttctgctttaccatcacgctgaatatcttgcaaaaagtgatgcgtttgagtttgctcttctgcatcaagctggttcagaaaatcaatcaactcctgtttatgctgtttccattcactgagcaactcgggtggaatactgctgcggcgagtctcgtattgcaaacgattatcagtaacgaacagagtaattccctgctctaaagattcattgataattcgcgcggcatttctcatatatcacctttcaatagttcttgcgttgtttctttcccagcctggaaatgttttcttttttctttgataagatgaatagtgaccacctgtgataactgctcaagtgtcgggtgttcaaaaacacttctcaacggaacttctatttctaattcgttacgtattgaactaataaggcgggtcgcttgaagtgaatgtccacccaatgtgaagaaattgtcatagatgcctacttggctgacattcaataaccgcttccataactgaccaatcttaatttctatttcatttcttggtgccacatagttttgtcggcgtaaatcatcttcatttgggatcggtaacgcttttttatccactttgttatttaatgtgagtggcattcgttccagtggaatatagagacttggcaccatatattctggcagttgctgtttcagtgcggattcgagtaattctgacagttccccactgatggccgaaatttgcggataattagctaaatgggtttgattatagtcagcacgtgcttgtaccggcggtaactctccacgactaaaaatcacatccagcaaatcaggttgctgttgtgaccatgtaatgccgcattgataaccacattgttcagcgtattgcaataaggattcgaattcctgaacctgttgtaatgcctgtggggagaaactgccaacatttgcgggtggcgttatcatctgattggctgaccagtgacgcagcccttctgccaaagtgaggtcatctttaattctggcgttggggatacctgaaacacccaatatatcctcggtgcccatctgtaacaaattacgcagactgtcaaaagaatcgaaatgatgccaatttgaaaacaattcattacaagatttggtcttttcacctcttttgtgcaatatgacatcgtaacgataacgcaacatttcattgtcgccgatgccacgtttaaccagaatatcaacccgaccaatttcggggtaacgctccggtaattgggcaaaataagttggactgagtaaaaactcgggttcttgttgtaaacgccgctgaacacggttcgccagcgtccctacctgaatacgctgcccgttaagatgactttgctctattgctgtagcatgggcggttaatagatctaaattgcggatatctcccagcaaaattttcccacccgcttccaccgccggtattaactgttcaagtactttttccagatattgaacattggggaaatattggataaccgagttaatcacgacagtatcaaattcatcagcgctcaatgttcctaagttgagcgcatcgcctcttctgagctgcacatgtgaccagccacgttgttgcagaatatgttgatgccgatttaaaacctcagccgaaatatcggtcgccaccactgattcgcactgttcagcatagcgatacaacaataatccggtaccacaaccaatttccagtaagcgatgaggatgcagggctttaatcctgtgcatgattcctgttaaccattcctccatttgctcaagggcaatcggctgttcagtatagctgttcatccagccgccgaaatcactgtctgatgcaactacatcacctttctgagtgctctctttttgagtactattcgttgtaggtttcgttgtaggtttcgttgtggtttgacggtactgatcatcaaaaatttctgtccagttctcaacgctgcttgcgttaaattcaaccgctttctcacctaaccactctgtacttgggcagacatacgcaatgagttttttatcttcatcttgaccataagcgaccacaacagcactacttaaagcatcatgcccggacaaaactgtctcgatttcacccaactctatgcggtgactacggatcttaacctgagagtcaacacggccgataaattccaattgaccattcggtgtccaacgcactaaatcgcccgttcgataaagcctgttttccccgccatccgttgagtgtgggctgaatggatcacggataaactgccttgctgtgatttccggtgcgtttcggtaaccacgtgctaactgaataccgccaatatacagttccccgataacgcccatcggagccaaattaccttccggatcaagaatacgcatcacaacgttaggcaacggttttccaatcgtaatcttctcgtcagtgagtaaagctgtggtgacaatggatgtacattctgtcgggccatatacgttaaacagttttctattctgtgaccaacgaacagcaatctgtggtggtactgcttcacccgccaaaagcaaagttgagacagaacgccatttattaaaattcagatgaggaagcagtgccggtggtagtaccgcatgggttatctgatgtttttcaaccacttcatccaacagttcaggggaacgccgttgggtttcggaaatcaaatagagtgttgcgccataggccaatgtcatcgacatctctaaaatcatggcatcaaaactccaggaggcaaactgcaacccccggcaatgtgagtcaatgccaaataaatctgcttgcgagaatgccagattaacccaccctctatgttccagcatcacccctttcggtttaccggtagaaccggaagtataaatcacataagctagatgattttccgtgagcggaagtggacgctcagtaatattatctgtaggcatatgttgtagctgagactgtaccgtctctgtatccaaacaaatcactttctgctggctgattggcagtttttcaaccaggtgagtttcggtcaggatgaattcgacttcactgtgatccaacatatattgaaggcgggctttcggataactggggtctaacggtacataagcgccacctgctttaagaatacccaataatgccacaacagcttgcaatgaccttggtatgcaaaatgcaaccaacgtgcccggtatgatcccctgttcgagcagatagtgagccaattggttagcttgttcatttaatgactgataactcagggtgtcatcgcccaaaatcagtgcatttttttcagggtgttgtgatacctgatcttcgaagagttcatggaaacatttcccggtcggataaggaatttgtggcccactccattcatgcagtaaggtattccgttcagcatccgccaataatggaaggtcatgaacggacggctcgctgatacccgcatgatgcttcatcacatcaacaatattagtcagcaaaatttcgtaattggcgattaatctgttaatggtcgcatttctgaacaggctggtgtcagagatccatccaatggataactcaccttcgtcttcttcatagatatgaacttccaaatcaaatcgggtggtcagcagagaacgttctttagatgtcacgatgctatcctgctccagcgttgtatcccgttgattattctgtactgcaaacatgatctggaaaataggattataatttaaattccgttctgggctgattttctccaccagcatctcaaaaggcaggtcttgatgtgcataagcatccaggatcgtacgactattttgttttaataactcactgaatgtcggctgaccggataaatccgttctgatcaccagtgaattgacgaaaaatccaatcaaaggctcagtgtcacggtgtcttcgtccggcaagcggcatgccaaccagaatatccttttcactactgtaacgactcaacaacacagcaaaagccgtttccagaaacataaataacgtcacttcatgtttggcgcacagtgctcgtatttcttgggtcaacgcttttgaaatacgttgtggatgaacattcccttcaaaattttgtttttctggtcgaggattatccaatggaaaacggtgaagaggagaaatagctgataattggttttgccagtaatccagttgtttttccagaatatccccttgcagccaatcccgttgccattgtgaataatcagtatattgaacgggtaatggtggcagaggattaccctcgccttggcaataagcacgatataatgtcagcagctcactgataaagattgccagcgaccagccatcacaagcgatatgatgaatcgtatagagaatgaaataatcatcatctgctaattttagcaaccgaatacgcagcatcaggtcagtgctgagattaacagcttgtttccactcttgctcaccgagttgtttaacctgttgttgctgctcaaattctgcaagtgtggacagatcatgtatggtaatcggcaaatcataagcagtcgcgataacctgccggggctcattatcaataattttgaaataagtacgcagcgattcatgacgttcaagtaatgttgctatagccgcctcaaaagcgttgagattgagcgactctctcaacctgaaatcacctgtgcagttatattgcggactgccttcggtgagttgatcgattaaccacaaacgctgttgagcaaatgaaagtgggtaatgttccgcacgatcataacgcggaataccttgcagtcggtgagtgtccgaatcctcttctgaatcgatttgcttcaggaaatcaatcaattcttgtttatattgtttccattcattaagcagttccgaaggaatgctgtctcggctggttttatatttcagtttgttatcaataacaaacagagtaattccttgatttaaagcttcattgataatttgtgccgcatttttcatatatcaccttccaatagtttctgtgttgtctcttgtccagcctggaaatgctttcttttttctttaacctgatgaatcgtggcgattcgtgctaatcgctccagtgttggatgctcaaagacactgctcaacagtatttcaatgtttagatcattgcgtattaagctgataaggcgggttgcctgaagagagtgaccacccagcacaaaaaagttgtcataaatgccgacttgactaacgcccaacacttcttgccataactgactgatttttctctctacttcatttcttggcgcgacataaccttgttggcggaaatcattttcatttggaataggcaacgcttttttgcccactttgttatttaacgtgagtggcattcgctctagcggaatataaaggcttggcaccatgtattctggtaattgttttttcagtgctgattcaagtagctcagaaagttcagctttaatatcggaggattgagaaacgttgtcggtattaaattttagcccttttttatccagccaatctttggttggacaaacataggcaatcaatcttttatcgttcccataagtcataaccgcagcactgcttaaagcatcatgcccgaccagtacagtttcgatttctcccaactcaatcctgaatcctctaatcttgacttgagagtcaatccggtcaataaattccacactaccatcaggcaaccaacgggctaaatctcccgttcggtataaacgttgggattgggatttgcccgtcaaatcagtcataaatttcgttgcgtttgtttcaggagaattcaaatacccgcgtgccagttggatgccgccaatacataattccccggcaacaccaacaggaactaaattgcctgatggatcaagaatacggataacggtattaggcaatggtttcccaatcgtaattttgtcatccgttaataagcccgaagtcacaatagcagtacactctgtcgggccatagacgttgaacagttttctgccctgtgaccaacgaacggcgatctgtggtggtaccgcttcccctgctaaaagtaaggttgaaacggaacgccatttgttaaagtctaggtaaggcagcaaagcgggtggtaatacagcatgggtaatctgatgtttatcaactaactcatccaaatattcagggctatgctgttgagtttctgaaattaaataaagtgcagctccatacgccagtgtcatcgatatttctaagatcatggcatcaaagctccaggaagcgaactgcaatccccggctatatgaatcaacaccaaataaacccgcctgcgaaagtgccagatttacccaccccttatgttccaacataactcctttcggtttacccgtagaaccagaggtataaataacgtaagccagattattttccgttagtgggaatgggcgttcagcgatattgtccgcaggcatgtgctgcaattgtgattgtattgtctcagtatccaaacagatgactttctgttggctgattgggagtttttctatcagatttgtttcggtcagaatgaactcagcttcgctgtgttctaacatatattgaagacgggatttcggatagctgggatctaacggcaaataagctccgccggctttaataatccccagtagcgcgactacagcgcgtattgaacgaggaatacagagcgcgaccaatgtttctggtttgatcttttgttctatcaagtagtgagcaagttggttagcttgtttatttagttcctgataacttaatgaattgccgtcaaaaataacggctattttttcaggataccgcgcagcttgttgctcaaatagttcatgaaaacagccgccatgctggatatgatcctgcgggccattccattcatgtaataaagtctgtatttcagcttctgctaacagaggaatatcatggacagagggttccttgtatatcagatcggaaccaatgcatggcttcatgacactaacaatattagcaagcaaggtttcataattggcgagtaatctttcaatagtcatattgttgaacaagctgctgtcataaacccataacagggataatcccccctcctcttcttcataaatatgaatttccaaatcaaatcggactttcaaaagcagacgttcttcaaactcaatattattatcctgcgccagtaccgtatcacactgagtattctccagagtaaaagcgatttggaatatcgggttataatttaagtttcgtcccggactcattttttctaccagcatttgaaatggcagatcttgatgtgcataagcatccagaatagtgcgactgttctgctttaataattcactgaaagtgggctggccggataaatccgttctgatcaccagagagttaacaaaaaagccaatcagaggctcaatatcatggtgccttctccctgcaagtggtgttccgaccagaatatctttttcattactgtaacgactcaacaatacggcaaaggctgtctccagaaacatgaataatgtgacttcatgttggtgacataatactcttatttcttgtgtcaaatcctttgaaatacgttgttcattaagccgcccctcaaaactctgtttctctggtcgtgggttatccagtggaaaacggtgaagtggagaaatacctgataactgggtttgccaataatccagttgttttttcagaatatcgccttgcagccaatttcgttgccattgagcataatcggtatattggattttaagtggcggtaatggggctatttttcctttactatacgcgcgatataaggtgataagttcattgacaaagatctctattgaccagctatcacaggcaatatggtgaatggtataaataatcacataatcattttcagccagctttatcaggcgaatacgcaacatcaaatcagtactgaggttaaaaaccaagttatcttcttctttactgaatcttttgatttgagattcttgctcagtttcagagaatgcggtcaaatcatgtcgtgtaatgggtaaatcatagcaatgtgttatgacttgccgtggctcattatcaataactttaatatgggtacgtaacgcctcatgacgctcaagcaatgtttttaccgcagccttaaaagcgttgaaattcagttgctcccgtaatctcaaatatccgggacaattatattgaggactaccttcggtaagttggtcgataaaccacaggcgttgttgagcaaatgagagtggataatgttctgcattgccatcacgttggatattctgtaattgatatgtttgaatttcttcttctgcatcgatctggctcaggaagtcgatcaactcttgtttataatttttccattcattgaataattccgtcggaatactatcacggttagtttcgtattgtaatcgattatcagcaacaaacagagtaattccttgatttaaagcctcattcacaatttgcactgcatttttcatatatttccttgaaaatataacatcaaattatttatataagtgattatttatgacgctcgtaattgtaaaataacgaatttctaatcatgttagcatatggacatcgaaaatcattatctaagttgtttgattttattatcaaaaacagtgagaaaatatgaaggtttttttaatagatgagcaatataaaaatcacacctaagttaataaccatttaaaaatataataggaatattctatttatcaattaactatttacctgctattaatataaatctgcatctaaaaaacattaatcacaaaaataactgatattctctttttactgactggacataatggcattcattaatctcccataatatcggagtaaactatcaatagcttctttggaatagagttatggattatatgcaaattcaaatgttatatttttgggcttgttgatataaatcgccccaagtgattcgaaaggagaaggtcttacgaattgcatccaaggattttctagaacaaaagatcaagcctgcaatagtccaatttcttgcaaaatagcatccacgttggagcgccatgctgccgcgccagccaaagagttgaacgaaagaatagtcaggccgaagaaccggaaacaggctcaagatgaagctgataaatcagcatcggcaagcacataatccccatctgcatcaagccctctcacacaaatgtcctgtaatgcagggcttttttaataacaactcctaagctgcctatatttatagcttgttttcgaaaataaggatttcaatattagatattcaatctcaaatttgtatcaactagatcaatcaacgattttggtacaccaaaatcagcggctaccttactccaagcagagactttttctatggtttcctcaataatcccattgaccatttttttggtgaatagtgggcttagtttctccaatgaataaaaatcttgccgagtgaagttgtctcttttaccatttaaactcatccagtgactgctaacccatctactgtcaggcttgtaactgtaggctaaatcgtaagccggggccaaatcccattttttgccttttaatataaacgcgaagtttttagcgtgatcatcatgatttctagcaatgatattaaagcacattcttcttagtagctgttcagcagccttagccgatagttttagctgcctagcaacaaagaaaagttctgcgtaggagaaggagcctggttttttatagtcaacgtgagcaagtccatttaatgtttggacatggatttttttattccccagacgatcaaaacgctgtgtgataaagtgacgcctattgccttcatggagtaatcggcaaggcatcatgtctataccgcagtcttttgccatcaaatggtatacatattccattgctccaaagcctagtggatcaccaaaggtttcctgatttttgttgtgctcactgacaccatcaaatttcataagatagtgaataaaaccgtcaggaactttaacttgaccagagcgaacctgagtaaaatcctcattaaaggctaatacagctttgggtctggctccgccagcactcatacccacggaaagtaatgacatcatggcctcgcgatcttcctgaccattattaatcaactcagcagtaaaatttccacgggagttaagaatttcttgggcaatagaaaccaatgaacctatttctacttgttttgaggaagtaagatttctcattttggttgctggtgcgtattcaagagcgcccatcccccttttcccagtatattgaagtcgctgcaaaggtgtaatgtcgttaggagatttaccttgagctgcaacccatgcattgagtacagcgttgccaaaatcatctggcaatgagtctgcaatcaatccaggtagccctttaaacgtgtggtagtccagttctggaaaactgtagattttatttgacaaaggcattttcaacggagacagttcgatccctttagcgataaagctggggtcgtactgaaataagcccaagtttttactagggtcaaaactcatcgcaccaacttcatgttgattgtaaattacgttgataacttccattaccattctggcgtatcctcttcaatatggttttttctaagaccagatgcccgttgtcgtttttttccctgaagtttagcgagttgaataggagatatactttgtttgggaagaaaaagatctaattgttcggttaagtttaatgctgccataatggcaacaaaaatctctaattggactttacctttttcagcattcagtacagtttttcttgtgacgcctaaaagctcagcaatttcagcttgagtcagatcattgtttagtcgagcttgtttcaagcgttctcccaactcttctgcaattgctgaagctgttttttcatgtaacatcataacgctcccataatgacacattaaagccgttattatctataatgagcaattataagcacattacatatcaatcacaaccttatatgctaatgtcctattaaaaggacattatagactttaacagcagtaatatcctatatatggaacattatgagatgagttgatatcggtagaaactgaatgcacgcgtcattggattaacccgatggaatggcaattgatttgggtaaacatagcggggccgttcttcatcgatcaatgtcagcgtgacatgtgttaatttcttgctggtccggttaaaagccagaaatatcccctctttctgcatatctagcgacacataatcgtcaccagaatctcctctaggcttactcttataaggaattaacccttcatcaaaaatttcctgataagatttacccaggctgcttattaacgcctctacatttatcgtcactatttatataacctctttatttatatctgacctatagcatataaacatggataatggtttattaactgctattaaatgaaagtagaaaaatattccagaaagcgtttatacaatatgctcaaagattaatgcatgtacccgtaaatcagccaaatagagaaaacgaatttctgtattaggatattgctcactcaacttacgtgtataagaatcatatccaccaaccatgccaatgacagggatcttttctgggccatcagcagaatctggttcccccataagtgctctaacaattgttctatccactgaatgtgaaaatggataaggtatttctccattatatgcaccgttattgtcatagatattaatcaatgtgaactgtctcgattttagccgcttcgaaacatcatcaaaaacaagtctcatacctgattcaggtttataaaaaaactcctcatctccttcaaagaaatattcaaacttattagctggaataatctctttttcaattatttgttctgctgtttgtcccaaattatcaattaactctttaatgttaaataagattctaaaatagtgctatatcttataccactcataattccatatataacaatgggttgaagaaggccatgtgtagcggaattatgaaacgctatttaattgccattattttcataacctctgttcttgattaagctaaggctatattcccagctcaaaaaccaaccatctaacacgcaaatcagctaaatataatcgcggaaatctttttcctaatttaccgaatcccttttattttttgaagccaggttttccgtttttagctcgccattcttttataactttaagcacacctcctggactatcttcaactccattttctgggtaaaaaattagtccatttcgtctggggtgatcggtaattatctcaatatgttttactaaactgtgatattcgttctcagttttacattcaccatcgaagattttattcagcagaactaaaaattcagcttctgtataatcttccaacttatttttcagttccattctactttacctctttatttaaatgagttggctattaaaacggttcccctcttattattgactaccaacgtacttctgatgtaggtaagaatgtcactgatataacttgctccaatagatcataatcaaacttcatactggtcggaatacgaaaatccagcaatgaatataactcagtccagccaatgtcttttttgagcctttttctcggtggaagaaatttttctggtttgccaaattgttcatgaacccactgtcggcacatcaatggaattaatggtgaaggcaactcattagtaaactggtataaagaattcttctcgtcaaacaaagttaatgtaatttcttttaatcgctttccttcccgatggaaagacagaaaaacgccttctttaaccatatccaagcatactatactatcaccggcaaaccctgttggtttagttttataaggaattagtccctcatcataaatatcttggtaggttctacctaaactattaattaacgattcaacattaaccgtcattatttttacatccccttctctgatatatcttccacttagattttcaaatttttcacaggaaaaattatatttccctctcaaaaaccaatcctcgaacacgcaaatctattaaatataggacacgaatatttgtattggggtatataaagtgaagtttacgaatataacaatcatgtccgccgacaacaccaataacaggaatttttgtttcccctgaggtaacatcaggttcgcctagcaaagctctaacagcaactttatccattgatagagtaaacggaggaggcatttccccatgatacatttcactatttccagaacgtccagaaatactaatcagtgtaaattcaactgacctcaattttctcgatttatcatcgaataccaagataagaccagcctcaggctcataattaaacgtatcagctccttcaaaaaggtattcaaattttttatcagaaataagttttttttcaactaattgttccaccgtttgtcctaaacttttaatcatcgtcataatatctgccattattcccccttttcagatagagtgttgaaattctgcatgtgttccatttcttgatcgccccgcaaaatttctatacaaatctacttcaaacaatttcaccggtggtttactcaaatacacatacaccggcggcatattcggaataggaaataccagaatataatcgcggaaatccttttcttccgaaatcggtagcgattcaatatcagtatgatagttgtgaggtattcactttgattgtgatgaaaaggatttttataatccttttcatcacttactcaatctctattttttaaagccaggtttgccgtttttggttctccattcctttactacttcaagcacaccttcaggactatcttcaatgccatcttctggatagaagattaaatcaccgccagaggggtgttctgaaattctttcaaattcatctatagcttctgattcttcctcctctgttcgaaaatttccattaaatattttctttatcaaggataaaaattcattttcagtaatattcattacattattttccatagtttattcacctccaactatgtagttcaccatgtctctttggcgtaacaacactaatgttatcaacattataaacatctccacctttagaaataggctttttatgatgtaattcgtattttttcttttttcctttccattcgtctttccttggagctggagcttttccttttttcatatttcccatattcgcagttttaaattgcttagaaaactcagggtcattagcaacttctttccaaaacgcatttctgaaattatcaaagttattaaacttcctcccacgcaacttatctgctatctgactgggaattggtgctcccatatcttgccctgctcgacttaaccagtttccttcgattttttgtccccgaccagttaccactcccggttgattccgaggaatattaaacatcacatagatcggctccatgcctgaatcggctgggaataccagaatataatcacggaaatctttttcctacgttacgggcagcgatttaatatcgctatccactttaccaaagacaaataattagaaatcacacttcactcaaatttttttaaacgttatattactcaccttctgatctgtagaatacgcaaaaattattcgtgtatttgggtattgatcgctcatccggtcaatataagtatcccatcctccaaccattccaataactggcaatttaacagcaccctttgtctctgatggctctcctaacacagatttaacctttgtcttatccatttcagacaaaaatgggggcggcatttcacctctataaatcttcatccttggcccagacgtaattagagtaataccgactgagattaacaaccttgatttatcttcaaaaactaacgttaatccatcctctggcatacagagaaattcatcgtctccttcaaacaaatattcaaactttcctgtcgggataagttgtttttcaattaataaatctgctgttttccctaagctattaataagctccttaatactcatgcctaacctctagcatacaagcacggataatggtttactagccactatccgccgattatagtatgtaaaaaagctctcttctcagatagtgttgaaagtaagagctctcactcgataataagcatcataaataaaaatgacttccacgtttggacaagattttatacgatttatataagcatcgtatccaccaataacacctataaccggtgcttctatcatatcttttgactccataggttctccatattcagctcttatcattgccttatccattaaaggtaaaaatggataaggcaaactaccattatattcatcatgatcaccatgtatatcaattagagttatctggactgaattcaattgcctagatttagaatcaaaaactaatgtgattcctttttcaggttcgcaattgaacgattcatccccttcaaaatgaaacttaaatattcctttagatatctcaccatcttcaactaacgtttcagcggttcttccaagacatttaattaatttcgtaatgtcagccactatttataccacccttgttctttattcagttggtgtaattcttctcgtgccttgttcaactgatcatctgtatagccttcttctcgtaggccgggaacttgagcatcaaaattactgtctaccgccactctaatatctgatgcgtctttaacttgtttcgcctttgtattcctgcccttataagtttcactatagcctctgtgaaccctatgagggatagctatggatacaccactattgagtatcttatctatgtctttatctgttgcagccttacctaacttattttttaaaaacaatttcaacgctgccttagaaggaatatgatcaatatccaacccatcattacggctacgtccagccagatcctgatattctcccacttccaacggtttcaccggtggtttactcaaatacacatacaccggcggcatattaggaacagggaggatcagaatataatcacgaaaatccttctcttccggcataggtaacgattcaatatcgctgcccactttctccgggatcggcaacacggttatttgcgacggaataaacggctgttcttcattcccggtatgggctggcaccttgaattcctgttcgttcggcgtccataaaatcgtcggccggtattcccccggttcccaaaactcgtaattaccggtggtccgattcagcgtcatcatgcgaaccggtactttatccaagccgccttccgggctgacgtgatatccctgaaccgtcatcctgccgcttttttcatctctgatccagcgaaaacgtacacgagttggcgctttaccgtactgttccgctatctgtctcaggcgagacggatctaagtaatcctcctcaccctcattcagcttaggtgaataaaacagccccattaatccaactgtcaccggattcggcgccgctagccaacgtcctgcactgatagcgccgccgccaatgtaacgcatcaccagcgtttccccttccgctaccgcgctacgagcagtggcggccacggcagcagcagccgcttcggctttatcttcaccaccacggaaccaccgtttataccacggtaattttttatcctgcggtttatccggttcagacggctgtttctcaccttgcggaggcggttctggtttttgcggcgtcaccggagtgggagatgacggaacctgatatatcgccactctgccgaagttatccgccggttcggcttcggttccggcatcggtacaacctttaccccgtaagcaggatttcgcaaacaccggtatcggaggctctttagtcacaggaggtgcgggctgaacgtttctcgcttcctccaccggcgacgagaaattttgggtcgccatattaacaggggatgtagcccgattattgggttgctcctgcttctcatagctgtccatctccgaattgataaacctagcccgacaagggcaagtactcacactgtccaatgtgccagccaacttacgtcccatatcaaacacatctgatacaccaccgacaatcgtataactaccgggatgtttgccacaggtgaccttatctccttcacgagcggttgcccgtccattaaatgtcatggtgtggtcaccggtaataatctgtccgccacaggttgtcttatcaccaacaagcaagaaatatcctattgccattattcatctctccattgatttacagtatggagagtggatctaattgaaattatcgtcatatcattatcaccatgagttaatacgaatgattaataattcatcacatttcgcttagaaaacatataggaatattctgaaaattgctgattttattgccccaaacaggtgtaaaacatcatgttttgaaacaatttataaacaattacataacacaagcagataatcaccgccattgcgatgatcatatatcccctatggatttcaagatggatcgcgacggcaagggagcgaatccccggtcacatagcgaacgatgtgaccggggtgagtgagcgcagccaacaaagaggcaatttgaaagatgacaggtataaagtcgaaaaaataatggttcggtatgtttggaaagccgttaaactcagaaaatcaaaacgctgaccattaaagatcagcgctttgtcattcatctcaaatcaaatattgattattggccaaacatctctcgcaaccagcccggtgcttcttcttgctgttgaaccggtgctgataccgctgtttgttggcacaaactctgtggatcataagtccaaaccggtaatgttcgccaaccactgccactacagctaaagctgccatcctgattaaccgccatatcgacaatgccttccggtggaatgttattcaacatcagcggcgtctgattttccagataacggcgatatacattcaacgcccctgtagcgcctgtcagattggtcggtccgttgttatcgcgaccaacccatgcgatcaccacttctttaccatcgattccggcaaaccagctatcacgcagatcattggtagtgcccgttttacccgccagattataacgaccaaacttagcattcagagaacgagaagttccattcgccaccacctgctgcataccatatagcgtcagataagccgcctgagccggtacagcccgttcagcctgtgggtaactctgatatatcacggtgccatcctccgcgatgacagaacgtaacgcggaaagcgtcgcacgattgccgccactcgtcatcgtctggtattcctgcgccacttctaaaggtgtcaagctaagagaacccagtaacatggctggaacctgttgaatcacttcctccggtacgccaagccggatcaatgtgttgctgacatgatcaagaccaactgccaatccaagattcaccgtaggaatattcaatgaattcgccagcccatctatcaacaggacacgtccacggaaacgacggtcataatttctcggttcccaaaccttgctgttcggctgttttaccgcaagaggttcatccgacagccaagtattcagtcgaaattgatcaggctcactcaatgccgccaaataagtcgaaggttttgccagtgaaccaattgaacgacgcgccatcattgctcggttaaatccagcatactgcggttgagaaccaccaaccatcgccctgatttcaccactgatgcgatcgacaattaccattgctccttcaaggtcagcaattttgcgagtttttctcagactggcaatcccctcttctactgcgttttcagccgcatcttgagatactgggtccaaagtagtgaagattttcacgccggacagatcattcactctatcccccagtttgtcctgcaactccttacgaacgagctgcataaacgccggttgcggggtaataacaccacctttcggttttacccccagtggacgagcacttaataatttataaagatcttcatcaataatttgctggttttgtaacagcttgagcaccacattacgacgctggagagtgagtttaggattgcgccacggattatagagtgaagcgcctttcaccataccaaccagcaacgcctgttgatccaaactcaattcatccacgggacgaccaaaatagtagaggctcgccagcggaaatcctcggatctccccatcaccactttggcctaaaaaaacttcgttcagatacagttcgagaatccgatctttgctgtaacgataatccatcagcacagccatataggcttcattagctttacgtaccaaagtgcgttcattggtcaggaacaggtttctcaccaattgttgcgtcagggtacttcccccctgaaccgtgcgcccggcagtcaagttagccagtgctgcacgcccaatggaaagaatacggatgccatcatgttgatagaaatggcgatcttccgtcgccagcaaggtgttaaccagtaaatcagggaaaccagaacgcggcacaaatagccgctgctccccattgggagactgcaacatggtaatcagcttcggatcaaggcggaagaacccaaactgacgctgattttccagattttcgatccccgccaaacggttatcactgaaagttagcagagcgtggatctgcccctctttgctgtctgggaaatcaaacggacgacgcaacatttcaatggtttcacctctgacagaaaactctccgggacgggtaattttcgtcacctggcgatactgcatcccttccagcagatgtaccatctctttcttactgtagttcatgcccggttcaagattgaccatgcggccatagaccgccgcaggtaattcccagactctcccatcaatgcgatcgcggattttggcatccagatagacaccataagccgccaataatacggcaaaaataatgaatatcttgaataacaaccagaaccaacgccactttttcttaggtggacgggaatacattcctttctttgtcatgagttgatcctcttcatcatcgtagtcctcatcttcatagccattatcatcatccaacagataccgtctttttattgaccgtttacggcgggatacccattttttgcctttacgtccgattggttgacgatcttcaccagacattccaaaattctccgaaaccgtttagatgctattattgggttttcatattttttaatgaatttattcgccggcaaaaacaagggttaaactctattacgaatatttttttgtccgccgagtcggtaccgtattcgccggatcatccggccataaatgttttggataacgccctttcatctctttttgcacttcacgataggatccttgccaaaaagcagccaaatcctgtgtgatctgcaatggcctttgggcgggtgatagtagttcaagcaccagtgttacccgcccttttgccagagatgggctttgccactcaccatacatttcctgtatccgaactgataataccggtggtttatcactgaaataacggattgctatccgactgccggtagggacagtgtaataaataggcagttcattatccagacactgttgttgctgccaatccagcaaattttccagtgccggcaacaaatcaatctgtttcagccctttcaaatcacgcacaccagtaaggaacggcattaaccaatcatcaagagaagccattaatgcatcattattgactggcggccacagcatttcaggtaaccatttggccgcacattggatacggatgcacaactgaaccgccgcaggtgaccaattcagctcatgtaatccctcactgcgtaaccagtttagcagagcctgttgtaattgctcatcggaaggctttgccaatcgttgggcttttactgtcaggctgccacattgcagccgcttccaagcctgcaacgtccctttgttatcatcccattcaacgacactctgttcactgaataaattcggctgttgctgtatcagtcgttcaatatccagaggacaagccagcaaaatacgcgcgtcaggatttctactgttttgtaataatgaaggagccaccagccacgattcgccagataacgtttcttcatcatcgattatcgttcccagaccgttcgacagttgaaaacgccctcccttatcccgatttttggctattctgtcagggaaaccttgggctaatagcattgcagcaaatccaccgactggctcaccaaaatgatcacccatatttctaactaactgctttgcccgccgtaaccaatgagcttgtcgctgctcaacccaataagtgatgtccggctgaccatcacggggcggctcctccagaatcgcggtcagcatagcggcggttgccagcatatcggccccttgttccaaccccgcacataacatcgctgccagacgcggatcactaccggattccgccattttactgcctctggacgttaactgaccactgttactgattgcacctaactgtaataacagcgacttagccaccgccagagccgccgcaggtggtatatctagccagtgcaattgagaaatatcatgacacccccactgcaataaggagagccataagctactgagatcagcattcagaatttcgggctcactatgctctaccgctctttctgcctgttcttggctgaatagatgccaacacacaccggcttctaaccgtcctgcccgaccagctcgttgtgtcatagaagcttgactgatacgttgagtgatcaggcgagtcagaccatttttgggttcaaaacgcgtcgtgcgttcaagaccactatcaatcaccaaccgaataccttcaatcgttaaactggtttctgcaatattagtcgccaaaacaactttacggcgtccagatggtgaaggttcgatcgctttttgttgctcagccaatgacaacgcaccgtataacgggcacaaatcggtatcctcagccactctcccgctaagcagtccaaacacccgttgaatttccccgctacccggcaaaaacaacagcacagaaccttgctcctgttggagtaaccgcaatacaacggtggcgatactctgttcaaaaggttggtgagcagacaaaggacaataatgtctggtcacaggaaagcttcgcccttctgaaataatcactggtgcatcaggtaataaagaacagagccgctgattatccagcgtcgctgacatgatcaaaatgcgcagatcatcccgcagccctgcctgtacatccagcaacaatgccaacgccaaatcagcctgcaagctgcgctcatggaattcatccagaatcaccagagaaacccctgtcagcatagggtcctgctgtaacattcgggttaaaatgccttctgttaccacttcaaggcgagtagttacactcacttttgtttctgaacgcatccggtaacccacggtctgtccgatattttcattcagttgagcggcaaggcgattagcaacactgcgagcggcaatccgccgtggttctaacattatgatacgcccggaaaaagcggcttttttcaaaatttccaatggcaaagccgtcgatttccctgcaccggccggagcatgaagcaggacctgttgtgaatttttcaacgcactcaggacaggttcgacgatctcatatacaggcaataaagacacaaatactccataccaaagaaagttaactttcaaccgcctgcattgtagcattgcctgcttcaatcttatgccatccgtcattcaggcgtttttatggaattctatccactgtgccaatacagggtacagagagaatataatcatgcataattgccattgatacagtaatattgcggtttctgtttttaaaaacaaatagttagattagatatataaataattttaatgtcaaatacattgataaattcatttaatgtactaatattttaattacctagattcttaattatttttacaaagtcatgaaaggagtttaaaattaggctttgaattttgctttatcaaatatggttttgataaaaatttaaatgaattaacaaatgagtttcaatttgatgagttatctaccggaagaatactcttccgtaatacaacaaatgtatctaaatttaaaagtaaaagatatacccaatggatttcaagatgcatcgcgacggcaagggagcgaatccccgggagcatagataacgatgtgactggggtgagtgagtgcagccaacaaagaggcaacttgaaagatgacgggtatatttgtttttatctataataatgtcatcaaaagcatattcatttgataacatgaaactcagctttgttgaaggcggtgatttttacgttggtagtgtgtttggcgctcaaaattatgaatctcattctaatgttacattaaattctttttatatcatgaagaatgaagttacttattcagaatataaagaggtatatgaatgggctatattaaatggttatgattttgatgatggatgtaatggggcacattatgaagattgccttcctcctgagcaggaagaaggcaggcatcctgtgactagtattaaatggttagataccattcttttttcaaatgcattaagtgagaaattaaaactcactccagtatattttcaaaaaggaaataaaactattagaaaaaaagacaaaaacttagagatctttataaatacaaacgctaatggctatcgtttacctaccttaaatgaatggcatgttgcagcaaggggcggaaagcctgccttacgattaggaagatatggatactatcactctggaagcaatgattctaagaaggtggcatggtatccagagtttaatacaagtaattttggaacacaggttgtaggtaaattatctccaaacgacttagatttatacgatatgagtggaaatgtttctgaatgggtctatgatagttatgaacttggtacagttaagttgtactatttttgtggtggaagttatctttcccatgcaaacagcttatccagttgtgataaccatagttcaggatatattatgccagatgttggatttagattagttaggagctatttaaatgaaaaataaattttaccttatttttattttacttttctcgtttgaggcattttctcattgcggaaataaggtaaatctaaaggatggaatcaatcttatagatttgaatggtgatggaaaaaaagatgtaattttttatgccaaatttgaaaacaatacatctcatccaagtaacacattaactgtttttataaaaaataaaaatgggaaatttaatatagttccactcccaaatgatactggttttacttggtttgattttaaattatctgcttctgaaataaaaatacaagattacgagctaagggtaaaaaatggagtttattatattattttttttcgcaaaaaaaataatgatgatgacatatttggagaatacccagtagaatttattaaatatgatataaaatataacaatgaagtgcctggtatttcaaattattattgggattatactaaatcctatcttacaaagaaaaaatataaaaatgttagtgatgccatgacagaatataatatggagtgtagtttatgaaattttttttatttttttttgtttttttatcttttttttgtcattcaggagaaaatgaatcttttagaaaaaaaatacaaaaaaaaattgacgataaaatattattatgcctaggtgaaactgaatggccagtatcaattaatgaaaattctatatgggttaatgcgaacatggaatctcttgttgatgctggattagtgaaattggattttaaaagaggaaaaaataaattatggaacttaaccaagttaggaaaaaaagaatttaataaaaatggtgatttttgttacggtagaatgatgttaaaagacattctaagtataacttacataaataaaaaaagagggtttatagtttttaactactatgtgcatttattacctgaatgggctaaaagcaaatcaataagattcgcatattcttatctagataatattattacaggcattgacaatgaaaaatatcaaattgaatttgaaaaatctgacactggggttattaaaataataagtgatcctgttcaacttgaaattctttactaattttaagcgataataggggtttcaaaagcaacggaataatacactccgttaaataactatttaatggcagattcgactaaatatacattacacctgctggatagtcttggtattcagcataaaaacagttttatgaaacatcgttcaaaagcagttatttcggataaagattactccagccaatcattacgtagccgattaaaaaaatcagggaataaaagtgataattccgtatatacccaatggatttcaagatggatcgcgacggcaagggagcgaatccccgggagcatagataacgatgtgaccggggtgagtgagtgcagccaataaagaggcaacttgaaagatgacgggtataaatcaaacgaaaaatcccggtcagatagacgggtaaaattcgaccataagacgaaatgttgtggaaagatgttttggtcgactgaaagaacattgtagcattgcctgcttcaatcttatgccatccgtcattcaggagtttttatggaattccatccacctttacaatctgccacgctaattcgtcgttataaacgcttcctggctgatgtcatcacaccggaaggtgaaacactgactatccactgtgccaatacaggtgccatgaccggctgtgcgacaccgggagatacggtttggtattccacctccgataatccaaaacgtaaatacccaaacagttgggaattgacagaaacaccggctggtcactggatttgtgtcaatacgctcagagcaaatgatttagtcgccgaggctattgcacaaaatgccattccagaattttctgaatataaaaaaatcagccgggaagtgaaatatggcgaagagaacagtcggatagatttactgttacaagcagaacagcaggttaattgctatattgaagtgaaatcagtgacactgctccaagaaaattgtggctatttcccagatgctgtcacgacccgcggacagaaacacttgcgggaattgcagcacatagcagaacaagggcaaagagctgttttattttttgctgttctgcattctgggatcaatcaggtcgcggcggctgcacatattgatcataattattcatctcttttggaacaagcgcaaaactctggggtcgaagttatctgttaccaggccaacatgacgggaaaagggatggttttaggcgataagttaacttttttactgaaatgattaacttaccgactcacctaatatttgcagcccggttgtacaaggtgtaaaggcgtgcaatacatttgctttcacaccattgtgaaactaatggcaggaacaattgccaacccatgctccatctgctatttatagcggcctgtttttttcccccgctaggggtttgtttgatagtgcgtgtgtaggagaagtattatgcaagaagggcaaaaacgtaaaacctcgtccttaagcattctcgccatcgctggggtagaaccttaccaagaaaagccaggtgaagaatacatgaacgatgcccagttggcgcatttcaagctaattcttgaagcatggcgcaatcagctcagggatgaagtagatcgtactgtatctcatatgcaagatgaggcagcgaacttccctgatccagttgaccgtgcggcgcaggaagaagaattcagtcttgaattacgtaaccgcgatcgtgaacgtaaattgattaagaagatcgagaaaaccctgaaaaaagtcgaagatgacgatttcggtttttgtgaatcctgtggcatcgagatcggcatccgtcgtttggaagcccgtccaaccgcagatttgtgtattgattgtaaaaccctagccgaaatccgtgaaaaacagatggctggctaattaatggtgttccgaatacggcgtctttatgacgccgtataaacaaccccgctgatctccatatgataaaatctgaacgtccccaggcttatattgggcgtttcgccccatcaccttctggtgacctgcattttggttcattaatcactgccattggcagctatttgcaggcccgtgcttgtcagggaaagtggctgatacgtattgatgatattgatccgcctagagaagttcccggtgctgccagccgtattcttcacgcacttgagcattacggtttacattgggatggtgaaattctctatcaatctcagcgccatgaggcctactgtcatgtccttaatcaattgcaacaacaaggtttaagttattactgcacctgtacccgtcaacgtattcaccagattaatggtttttatgatagaaactgccgtgaattaaatttacccattgatcatgcagcaattcgattcaaacagcgtcatccggtttacggttttgaagataaattgcaaggatatctgaacgccgatccggtcatggctgaagaagattttattattcaccgtcgtgacggtttatttgcctataatttagtggttgttattgatgatgattaccaaggggtgaccgaagtggtaagaggggttgacttgattgaaccaaccgtccgtcagattgcgctttatcggcagttaaatctcaaaatacctgactatattcatttaccactcgctctgaataaggatggcaataaactttccaaacagaatcatgctcagccgatcccattggatgatccccgaccattactgattgaggcattatctttccttaatcaatctgttatagaaaactggcaagatctttctcgtgatcaattgttgcaaaaagcaacagcacattgggatctagaccgaattccacgacaaggtaaaatacacatagataacatgaataaagttacggttagtcataacaaccattctcaaaaaatacacagtaggctatgattagccgctgttttttatttgttttatatgattagttacttatcgaggtgtaccatttttaaccgagtagcaaatttctgccgtaacttattgatccgcgaagggaaaaataaccgcgaactacaggcagccagtgaaaggccagtcaccggatctgaccgttctgctcaagaagagtacgtaactcttcactctaatcgccaagccccttatcaacccttatctaatgtggagataccaagggaggttgaacaggagaaccctcattcggatttatcgataacgataattccacgggaacaacatcgtatttcccgcagagatatcagtgaaaatgcactgaaagtcctttaccgtttgaataaatccggttttgaagcctatctggttggcggtggtgtccgtgacttattactcggtacgaagccgaaagattttgatattgccaccaatgccacgccagaacaggtgcgtaaattatttcgcaactgccgtctggttggacgccgctttcgcttagctcatattatgtttggtcaggaagtgattgaagtcgcaacattccgtggtccacatgaacaaacgggttctgatgataaaaatcagtcacaacaagcacaaagcggtatgctactgcgggataacatcttcggttcaattgaagaagatgctatgcgccgcgatttcaccataaacagcctctattacggtatcaatgatttctctctgcgtgattatgccggtggccttcatgatctggaaaccggtgttatccgcttgattggcgatcctgaaacccgctatcgagaagatccagtaagaatgctgcgcgcgatccgtttcgctagcaaactgaatatgaccatcagcgaaggtaccgccgaacctatttctcgtttggcttttctgctgagtaatattccacctgcccgtctgtttgaagaatctttaaaacttttacaaaccggtcaaggctacagcacttatcaacttctgcgcgaataccgcctatttcaaccacttttcccattgattcaacgctatttcaccgaaaataacgattcaccaatggaacgtatagtcaatcaggttttgaagaataccgattaccggttacaaaatgataaacgggttaacccggcgtttttattcgccgcaatgctctggtatccactgatcgaacatgcggaaaagctatctcaagaaggtggtctggcttactacgatgcttttgcattggcgatgaatgacattctggatgagcaatgccactccattgccattcctaagcgcctgacaaccatcatgcgtgatatctggcaattacagttacgtctgccacgccgtcatggtaagcgggcaaataagctgatggaacaccctaaattccgtgctgcctatgatttgctggaactgagagccaatgttgaaaatcgcaatgagctcaaagagcttgtccattggtggggagaatttcagcaagtcaatgcatcacagcaacggagtatgatttccgaactgggcagtgagattgtccgtcgtcgtacacgaccacgccgtcactataaaccaagactgagcaggaacggctgataattatggctcgtgtttatatcgctgttggtagcaatctggcagaacctatgcagcaagtaaaaaatgcacttgctgcattaaaagatttaccggaaacagaatgtattgcctgctcctcactgtatcgtactaaaccgatggggccgcagaatcaacctgattttctgaatgcagcagtcgcactggaaaccacgctagcaccggaagaattactcaatcacactcaggcgattgaactgacccaaggacgggtaagaaaagatgaacgctgggggccaagaacacttgatctggatatcatgctatttggtgatcaagtgattaataccgaacgcttaacggtaccccactacggactaaaacagcgcgaatttatgctctacccgttagctgaaattgcccctgatcttatatttcctgatggggaagctttatctgaaagactgaaacacatcccagaaaacggcttggcactctggctgcaaccgcagtcctctgattctaatcactacatatagggatctcagttcagtccgcggccgatttctgtacataacaagaaaaattgcaggagaaggaagatagataatgaaaccaatgaccatgactgatctgaatcagctcaagaaagaaaaacgtaaattcgcgactattaccgcttatgacgccagctttgcccacctgtttgccgagcaaggtatcgatgtcatgctggttggtgactcactgggtatgactgtgcaaggggctgataccaccattccagtgacggttgaagatattgtctatcatactcgctgtgtccgtgccggaacaccttatacttttatcattgccgatatgcccttcatgagttatgccacgccagagcaaagttgtgaaaacgctgccaagcttatgcgtgctggcgctaacatggtgaaacttgaaggcggtagctggttatacgataccattaacatgcttaccgagcgttctgtacccgtttgcgcccatttagggctaactcctcaatcagtccatattcttggcggttataaagttcagggacgtgatgaagtatcagcgaatcaattgataaaagatgccattaccttagaaaaggcaggcatacaactgctagtactagaatgcgtacccgttgatttagctaaacgtatcaccgatgaattacagatcccggtaattggtattggtgccggtaatgtgactgatgggcaagttttagtgatgcatgacacactgggcattaccgtaagcccccctaaatttgtgaaaaacttccttgaagaagcagggaatatacgtgatgccattcgcctatataaagaacaggtggaaagtggtatttaccctggtaaagaacactcattttattaataaattcccctaaggagtattaagcaatgctgattgtcgaaactgtaccgattctacgccgtgaaatccgccgctggcgtcaggaaggaaaacgcattgcactggtgccaacaatgggtaacttgcacgacggccatatgacgttagtcgatacagccaaagggcaagcagatattgtgatcgtctctattttcgtcaatccgatgcagtttaatcgtccagatgatttggcaaaatatcctcgtaccttacaggaagattgcgaaaaacttcatcaacacggtgtcaatctggtatttgctcctgctgataaggaaatataccctgatggtatggaacatcagacttacgttgatgttcctgagctttctaccatgctggaaggggccagtcgtcccggtcatttccgtggtgtttcaaccgtagtgagtaaactgttcaatctggtacagccagatttaacctattttggcgaaaaagattttcaacaattacaacttattcgcaaaatgattgccgacctggcttatgatattacgctggtttcagtacccacggtgcgtgaccaaaatggcctggctctcagttcacgtaataacaatttaaccgccgatgaacatcgaatcgccccagaactcagcaagatcatgcgatctatcgctgaaaaaatggcacagggtgaacgtcacacagaacagttgctcactcaagcttcttcacagctacacgaagcgggctttgtacctgatgagttgtttatccgtgacgctgaaacattggcaccgttaaataccgaaagcaaaaaagccgttattctaatggctgcctggttagggcagacccgtatgatcgataatcagcaggtagatttaacgcaataatcgccgttgtatcaggcgttattgatgcaaaaaggttctaatttgtcatcgaatcaggagaaaaaccatgttgcgtacgatgctacaggggaaattgcaccgggtgaaagtcactcaggcagatttgcattatgaaggttcctgtgcaatggatcagaatttcatggatgcagccggtattctggaatatgaagctattgatatctataacgtggataacggtgagcgcttttccacttatgctattgccgctgaacgtggttctagaataatttcagttaacggagcagccgcacgccgtgctgcggtaggtgataagctaattatttgctcatatgtacaaatccctaacgaagatgcccgtcaccataagcctaatatcgcttacttcgatggtgataatattatgaggcggatcgccaaagccgtgccggttcaagtggcttaaattaaatttagtcccctaaaattagccagcaaaatttaggggacttcaaaaatagaaaccgttaataaattaccgaatttaagtcctcaatccccgccctgtttcaattaaataccaagcaacaagataaaaagccacaataaatgcagtcaaaacactcaacgtaattatcaaagaaacatcagtaatccccaggaaaccataacggaaaccactaatcatataaacgatcggattcaacttggaaaccgcttgccaaaatgggggtaataatgtcaatgaataaaacaccccaccaagataagtcagtggcgttaatacgaaagtcggaataatgctgatatcatcaaacgttttagcaaaaatcgaattcagcaacccccctagtgagaacaaaatggaggtcatcaacaacgtgacaacaatcatccaccacgcatgaatatgaagcggcacaaaaaatagagaaaccaatgtcaccagaataccgacgcagacaccacgggcaacaccaccaccaacaaaccccacaataactatatgtgtcggaaccggcgctactaataattcctcaatactgcgctggaatttcgcaccaaagaaggaggaagaaacattggcataagagttagtaatcaccgacatcataataaggccagggacaataaactgcatataatcgacaccgcccatttccccaatacgcgaaccaatcaagctaccgaagataataaaatagagcgacatggtaataaccggtggtaataaagtctgtacccagatacgaccaaaacgggtaatttctttaatccagatagtttttagcgccacccagtacaactgaatcatttactatctccttacttattgttcaccaagctgacaaataactcttccagacggttcgctttattacgcatacttaaaatatgaataccctgagcacttaattgggtaaatacgctatttattccctgaccacgctgaacatccacttccaaagtagaggcatccagcagtcgataatcatatcctactagttcaagaattgggttttgtgtcgccagatcgaagaagaatgtttcagactccacccgactgagtaaatttttcatactggtgttttccaccaattcaccatgctgaataataccaatattacggcacagcatttctgcttcttccagatagtgagtcgttagaataattgtcgttccttgggcattcagctcttgcaaaaaattccacatagagcgacgaagttcaatatcaacaccagcagtcggttcatcaaggatcaataacttaggctgatgcatcaacgctcgtacaatcatcaagcgtcgtttcatcccaccagacagacgaatcgcccgttggttgcgtttttcccacagatctaactgcaacagataagttttcgctctggcttgcgctacttttcgcggtacaccatagtaaccggcctgattgagaacaatctgcaacaccgtctcaaacgggttaaagttaaattcctgcggaacaagacctaactggcgtttagcattgacaatatcagtatcaatatcatagccaaacaccttaaccttaccgctgcttttgtttaccagagagctaataatgccgattgtggtggatttccctgcaccattcggacctaataatgcgtagaagtctccaacttccacattcagatctatcccacgcagtgccttaacaccatcagtgtaagtcttagtaagctgcgttaactccaatgcataagtcataaattacaaaacacctttattatctggtcgcttttgcgtgtaatgtggaaacataatgctgcttttctgcctgacttgctttacaaaaacagtagaaagattaaaaacaaacagcaataaaatattaaaatttcaattgatgttgtatatgattctatcttaaagaaacactaccaggctatgaatcatgatgaaaaaaatagaagagctgcttgccaataacaagcagtggtcagaatcggttaacgaagaaaatccaatttttttcaaagaattagcaaaatcacaaaaacctcatttcttatggattggttgttcagacagccgggtaccagcagaaaaactaattgatgccgcccccggtgacttatttgttcacagaaacgttgcaaacctggttattcatactgacttaaattgtctttcagttattcaatatgcagtagatgtactggaagttgaacatatcattatctgcggacactacggttgtggtggtatcgaagctgcaattgatggcaccgaactgggattgattaacaactggctgctacatattcgtgatctttggtataaacacagttctatgctaggtgaattaccccctaatgagcgtctgaaccgtctgtgcgaaattaacgttgttgagcaagtatataaccttggtcactcaaccattatgcaagcagcatggaaacgaggccaaaaagtgatgatccacggttgggtttacggtatccataatggtcaattgcaagatctggaagtcacggctgacagccgtgaaaaactggagcttgcctatcgccagacaatatccaaactgacgcataagaagtgattttttagatcattcataaaatacgctgtagaaaaggttatatttaactttttctatagtgtaattaaacgaagattttcaatttatagattatagattatagattatagattatagattatagattatagattatagattatagattatagattatagattatagattatagattatagattatagattatagattatagattatagattatagattatagattatagattatagattatattaaaaatatattttaattttttctcagacttaaaaattatattttaccctttaaactcatgataatatttttctccagagatattatctaaactagagtggaaaatttacaacataggttcgcgaagccttttgccgctctatctattaaatcccgatcctcttgcctaatcctcaagttgagtgtcttatttttacgattctcacttattacgttcatttcaaatctccttatgctataggtgagctaaataatacacaaacgtaacgccattatcatcacatttctagaggagagaattcccattaggcatagaggcttacatcggctttcgctaataaaaatgcaatatacccgttatctttcaagttgcctctttgctggctgcacctattcaccccagtcatatagttcgctacgctcccggggatttgctcccttgccgtcacgatgcatcttgaaatccatagggtatagccatttaaacctcaaatagctattttaatttttcgaatggatgcatgaggtaataagaagaaaacaaaataacccatgataaacataatataaacattcatcatgatatatagtcattgaattaataaatatccatccgatgtattaaaatattattttccaattaaaactgacatatttcatcttaaagtttatttctatatgaacaagaaaaaaatataaaaaactggaataaacaaactaacataattactgaaaatattttcataaaatggacaatatgacgataccacacctattcccccaagaaaataggtattaatgagctcctaaagatcaaaaaacaatggaatatctgaatgaaaataaacgatagtaagttaaaatgaatatgaaaaatgattttattaatattaagatgtaagaaatttttaatttatttttataaggttataaaaaatcatcatcaatgtaaaattcagtatttttttgattgagtcaacacactaaagcataatagtaaaaacttttaacatacagaaataaaaaacccaaaagttaattaatccattaaattaatcaggtgaatcagactacttttataatatttttgacaatttttacaattatttttagaataagaaaattacttatcctcaataatgtaaaatgagtaattaatctaaatactaattaattatcattcattgaatacttaaatattacagaaattatatgtatttgttgacatgccatgacgacctccgcatagtgtgcatatacagtatacgagactagtatgattaaaagcttcaaacacaaaggattggaaaaatttttcaaaactggttctaccgctggcattcagcctaagcatgccctaaagctgcaaatccagctaactgcattgaatacggctaaaaaaccagaagatatgaatgcccctagctggaaacttcacccactaaaaggagcaaatcttagcggtcactgggcaatatctgttaacagtaattggcgtttaacatttagatttgagggcgaagatataattctcgttaattatcaagattatcactgagggcaacgaaatgaaaatgcataaacctgcacacccaggcatagttttgcgtgaatatcttggtgacatatctgtcacggaagcagcaaaggctctcggtataaccagagctgcactatcccgcatattaaacggcaatgcaggaatatctgctgatatggccctgcgactggaagccgcattaggtactagtgccgaaatgtggacaggaatgcagtcccaatatgaactgtggattgcctcacagcacaaaagaccagaaataaaaccaatactggctcactcctgatagcgtaataagagggctttacttagccagctacaacactacacaccatgcctaataaaaacggcaacccgaaagttgccgttttcaaatacgagaaaactactcttctagcaaaaccacatggccgatataaggcagatgacggtaaagttgcgcataatcgataccataacccaccacaaatttatcctcaattgagtaaccaatccactccaccggaacatcaacttcacggcgggaaggtttatccagcaaggtacagattgccagtgattttggctcacgcaacgccaaaatttcacgcactttattcagggtattacctgaatcaataatatcttccacaatcagtacatgcttaccacgaatatcctcgtccagatctttcaggattttcacatcacgagtggaattcataccgctaccgtaactggaagccgtcataaagtcgacttgatgagggatctgaatttcacggcataaatcagccataaaaataaatgaacctctcagcaacccgaccaataccagcccactaccactgtcacaatagtgttcagtaatctgttttcccagttcagcaatacgttgtttaacctcctgttcggagatcataacttctacagtgtgtttcattataaagttaaccaattgtttttaatgaataaatatataaaaatcaataaaagattataaccagttgatatgccaattaatacgccattcttctagcaatattattgaacagttcctttcccttaggatatctcaaggcaagtatggcataagataaggatattcatgggaaaccaatctatagatcatacaccaaaactattattcagtaataatagctcacagcagcaaaccaacagatattttaactttggcggcgttgtaaaaggtcagtgaagataaaaaaatccgccctaaaagatgcggaaaatctgtcaccaaaattagtcatcagctactcagtagaaatcagataagcaactaacttgtcaccatccttacaactggcagctatcacttccaatggaatctcactattctggttagccgtcatccaaacactatcgtggctgatatcacgtatttctttaaacgagagattcccatatttttcgattgcttcatttatgcaatcaatatccgaatcactaaatacatcttcatcgaaatcacgcaaagcacgtatttgatgatttccatgacgtccctctactgacaacaatgaccgaatgacatcaacatcacacttatttggaataaagcgcccgtctcccctggctacttttataatatcataggcattcactgcaacagggccatctttcattgcaagatagttatcacccgtaattaaccgaccataacgctccaaatgcagccggtcagcaaaatacagaattttacccacatgataaacgtcagaaattggcgctatagaggcaacgtacagaatagcctctatagccttttctgagtcaaatcttgcactaatcatctcaattaccttcatttaaatatacccgttatctttcaagtttcctctttgttggctgcactcactcaccccggtcacatcgttatctatgctcccggggattcgctcccttgccgtcgcgatgcatcttgaaatccattgggtataaatagtattaatctgttattttaaaaaccgtttttaaatcctttagcgtgatcattaacgtcattggatttaaaagcgaatcactaaaacccacagacttataaaatgccttagcattctccgagatagcatggacaatcaaccccctaacacccaccaaatctgccgcttgagcgacacgtatggaagcatctctaactaaatagcgaccaaaccctcttccttgataacgcttatcaacagctaagcgacccaaaataatcgtcggaataggatttggcatattacgcttaaacttgcttatcgcctcttctgacataattgagccggtcgctaacgaataataagcaataacatctctgtcttcgcttacaacataggttcgtgaagcattctctttttgattttttaatgctctgtctgttaaccagttgtctagggtatcaattcctgaagtaaaactatttaaattgtgatcatctgttaacaaggttggatcattaatcattttatcaccacggttttttcatatttgccgttttgataagacgctcatttggaacagccggagcatcaagtttagcaataaaagcattaaaaatttctggagatacaatcataaatgaatgttccaataacgtgttttcagcatcacgtttgattgtatcaaggacatattcagtaacggtttttcccttcacttttgctgctctatctattaaatcccgatcctcttgcctaatcctcaagttgagtgtcttatttttacgattctcacttattacgttcatttcaaatccccttatgctatatatggtctaaataatacacaaatgtaacgccattgtcatcacatttatggggggagagaactcccattaggcatagaggcttacatcggctttcgctaataaaatgcagtggtaatatttcaacaagggaacattgttgaagcccgcttaaggccaaaacggcaacccaaaagttgccgtttccaaaatatgataaaaactactcttccagcaaaattacatggccgatataaggcagatgacggtaaagttgcgcataatcgataccataacccaccacaaatttatcctcaattgagtaaccaatccactccaccggaacaccaacttcacggcgggaaggtttatccagcaaggtacaaattgccagtgattttggctcacgcagcgccaaaatttcacgtactttattcagggtattacctgaatcaataatatcttccacaatcagtacatgcttaccgcggatatcctcgtccagatctttcaggattttcacatcacgagtggaattcataccgctaccgtaactggaagccgtcataaagtcgacttgatgagggatctgaatttcacggcataaatcagccataaaaataaatgaacctctcagcaacccgaccaacaccaaatcactaccactgtcacgataatgttcagtaatctgttttcccagttcagcaatacgctgtttaacctccagttcggagatcataacttctacaatatgttttggtttactcataactatatatttttaaacgataactaaaataaaatcatgtgtctttttacaaaaagtgatacaccgattgatataccgttcaccacacaaagacgcacacacaaaaacatgagaacaaaatattttgcaaagcatatcagaattcaccgcctacagtaaaagaaggatatatgactcgttgccagtgagtagataagtacactaaacgttctggcctcgtgatagaaagttgcgacgcatttcgtcgaaaggtattaaagattacggtgatggataaccaattattctacctcatcaatcaaacaacacagtaggtaatgagatgaagtgaggtgactatttccctgatattttacggtattagaataattattctgctgatttctcgcgaactttgctctcaataagattactgtccatatcaaaataacgactaggccagatttcagataaatgaatgttgagataattagcgataatccattcgcctttaggccaaggacgtgacagcgtgttggctaatgtggaagaattcagtcccgcttcacgggataccgcagctaaggttggaccacgcttacgtagcgcagcaataatatcggcttgatgccagtcatttctaacattattcattcctgctaccccttccattaattgagaaaattgatgatggtgattcagacagggttcacagtaccggtagctaccttccggcaaggccgaagcctcccccgcctgaaccaccattactctttcaatctataaaatgccgtgtcagattcactgcgctgctagcaggcatgagcctgtaatcgtcgtactgcccttttgctgcggcgtcaagtccgcaaacagtcagcaaaagtggtgcaaacgttgaaataccaacaagcacagcaaaacgccgcaacgttaaggatcaaacggtagcaatgagctaattatttaggtgtagagaagccgcccgctaaatattttaagcaaacatagctaggcatgagcgagatgcgcaaaagcaatcctgctcattgaagtgaaatgagatcgagacgtagctcaatcccattgtgcgaaaggctatcacctaacgctaatgtgaaaagtaagcgagcgcatgtttcatgcccacttgaaatcagataaaagtaaagtggatcttccccaccttaaatccagctacgaaaggcaatgaaaaccataacctcacacgccgaagtaccgttggtactctattagctaaaaagaccgtcatcaccaaactagctaggattgttcatactagcaatatatgcttccaaaggtgtgcagatgtaccgcaattcttgctttcactttcaggctacagaagtttttctagtcgtttaagcgcttcctctcagacctacggaaacattgatgaccatctgtgatggtaattaaacagatttagactaacgaatgcttttactgacaataagagaaagtaatgactaaataaatatatcaataagtttttatttatatcatccaatagatttagcgcattatcatgataactttaattatagtttctcttgaaaagattagaggtttaatattttcttttaaaatttaattcatccctatattttcaagatgttaggataattaccacatttggttattttatttatttaaaaaaaagacattgacataaaaaaaacaaaaaaatataatcaagacaaatcaaaaaccctataaaaataataaacaagaatttatgaaaataaaaaaccataaaaacaccttattgtacagagccaaagaaatatcaaaattatctaaaaaaacctttaaaaaagaggctttattttttaatttttttatagtttatattgtctcggtatttatacttagattagacacccctattcttgagtatatagattacagtatgtcaataattttattgattatcatgttcagcactgcaaataaaatatccaatgaattttctttattgaaaaaaaggttcaaaaaagaatactcacatgataaaaaaccaaattttttttataagatatttactctatctattataactattttactgatattagtatcgattccttttttgtatatattaaatcatatccattatgatttttcgttaaaattatttttgaatacaatcataagttcttatatatatttgattgttattatttttagtaaacctgaatgaaggtaaatttattatgcgtgagcttaccattcaagagtttgatttagttgcaggtgcaggagcaggagaaaccgctggtgaaatagcaggagcagccgcagggggagctgctggaagagtagctggtagtgtagctggaggatatgctggagccgcagctggtgcagcaataggctctgtaatagcaccgggcccaggtactgcagctggtgcagtaattggtgttgttgttggtcgatttgcaggtggtggtgctggagctgccggaggagctgcagctggccgctacatcggaggagagataggaggtagaattgattctggagggaatagcaatggtgctgggaccaattattgtaattcaagtggatctaactattgccactaataaaccgtgatatttttagataaaaatgggtgtaattatacacccatcaaccaaaaaaaagaggctacgtaaacaaaaaccttttattttaataacctcttaataagataacttattactcacttatagagccacaatcaacaatcattaacattaaatatgaatccaattaattttcccattgataaaaaagacttcctagaaaatttcttcgaaaagaaaccgtgtgtttttaaaaaaatatatgatgatgattttataaaacatagtgaaatagaaaatatatttaatcgttccaacctgccttcatttgaaggtattaaattaatgtacaatggtattattgataaaacagaatatattgaatcctataatgatttaggcactagacggtatagatatatatactctaagttatatgactatctaaactcaggtgcaacactagttgcaaatggtataattaatgaaacaaaaatagatcaactggctaaggcttgctcttcatttacagatagtcatccgttttcaagcctatatttatcatatggagaaaaaagttcttttaaacctcattgggatagcagagatatattcgcaattcagttatcaggaaagaaaagatggataatttacaaaccaagctttcctgaccctgtatatttacatcaatcaaaagatatggaaaatacgtatccatgcccttctgaaccatatgatgattttgtgctggaaactggagatgtcctttatctaccaagaggatggtggcataatccattacctcttggtgaagagactatacatttatctgttggcatttttccaccttatgcccatgagtacataaactggttatcatataaaataaccgatattgacattggaaggaaatcacttccgagatcatggaaacaagctaaagatgaaattgatatcttagcaaaatatgttattgataatattacttcagaagattcatataatgaatttttaaaatctttcagcgatgaaaaaagggttccatcaaaattaaatctgagactattttgtggaaaaaaacatcattccatatccaagacatcacgcttaagaataaattcaaataataatctatccatagatgaaggatatattatttgcaacggagcaaaagtaaatttagatcaattctctatacatcttcttagtaaaattagtgagataccatatatatcattcgagaatctactttctttttttgatcatagtaaacaaaaaaacatagaagatttaatttataaactaggttaccaagatatattagaaattatagatgatttataaaagtgaattttttcgcaaggaggctttaaagcataaagcaatacctttggctggtcgagtaattttgaccagcccctttatttttaccgttttaacatatatttcatgccttcttgtattgtttataataatatttattatgtttactgattactctaggaaaacaaccataaaaggacaagtttaccctgaagatgggatcacaaaagtctattcaagagagacagggataattaacaaggttatgattaaagatggtcaatttgtaaaaaaaggcgaggttctgggtgttatatacaaagctcaaaacttaaacacaggaatactgcaagataaattaaaagagcaagccatcttaaagaagaaaacgttagatcaagccattgataaaatagataaaataggcggattcgactaataagtgcaatttttcagaagggcggtcagttgctatagtaggcatctttctcgccaaaggaaaatgcactatggcctatacacaactgaccgaaacagaaagataccagatttccagtttaagagaagcgggtttttcacagctttttattgcgaagtcacttaagcgaagcccatcgaccatcagcagagaattgaagagaaatcaagaagtccagacatactgccctgaacaggctcatttgaaggtattggcgcgtcgtcattttgctaaaaaggccgtgaaaataacgccggaagtaaaaagatggataaaacggttaatttggaaagatttaagccctgaacaggtggctgattatttgaagcaacataaagggatatctttgcatcatgagacgatttatagactgatttatcaagataaaagagaggggggggatttatggcaacatctgcgaatagccagaaaaccctatcgcaaacgctatggtcgctatgaaagaagaggtaaaattaaaaatcgggtcagtattgatgaacgcccggaaattgttgataaaaaagaacgtattggggactgggaaggagatacgataatagggaaagataaaaaaagtgtcttattaacattggttgaccgcaagacgctgtatacaattatcgttaaacttgatagcaagcaggcatcagaagtcgcgaaagcagcagtgaaagtattatacccgttaaaacaaaaggttaagaccatcacgttcgataacggtttggagttcgcagatcatgaaatcatcggtgaagaattagaaacccaaatttactttgctcacccttattcgccttgggaaagagggatcaatgagaatatcaatgggttaatcagacaatactttccaaagggaaccaattttaatgaaatctctgatcaggaaataaattttgtggtaaaccgattaaataatcgtcctcgaaaaacacggggtgggaaaacaccgaatgaattatttaaaggaatacgaacatgtttacttccagattaacgatgttgcacttattatgtgaatccaagatacataaaagtaaactagattcactacatgagcatgttgaaagcttaatgaaacaaaaagaaaatattaaggataaattaacatcacaacagaataaattagatagactaaaaaaaaataccaacagatacaaattattagaaagaaaaggatttatatcaaaagagcacataaccattgcagaaaatagtgaatcagaccaattaataaacttaagtttaacaaaaaaagaattgattgacatagaaagaacaattagtgaaaagaaatttgagttagaagaacttccattaaaacaatttatagaaaaacaagagatagatagaattttagcgtcagttaatcaagaaattataaatattgaaagccaaacggaatctgttatcgtggctagttcatcaggatttataaatattaataattttgatttaggttctcatgtagaacaatctactttattgttgaatatagtccccaataccaaaaaattctctattaatttatatattcctagccaatctatagggtttgttaaaaatggtgatatagttaatataagatattcagcatatccatatcaaaaattcggaatatttaaggctaaagttatttccataagtagaaccgcaataccagctcaagaggttaaaagcataggaaccgtattccatacattagacatagcaaatgaacctatttatttagtaaaggcagaacttgaaaaacaatacattgaaataaataaaataaaaaaggcattagagataggaatgactctagatgctgatattttacacgaaaaaagaaaattatacgagtggatattcgagccacttattactattaataaaaatagcatttgaataagatgatgaaattagaaaaaatcatattttggcattctcataatttgccatctattttacaaacagaaatagctgaatgtggcctagcttgtttagcatctatttcttcttatcatggataccaagttgatttatcttcgcttagaaaaaaattccgtattcctcttacaggtacaaatcttaatgatattgcttactacgctaaagagttaaaactatcttatagagctgttaaactagacatcaatgaaataaatcaattaaaactgccatgtattttacattgggagcttaatcattttgtagttttaaaaaaaatatcaaaaaatacaataacaataatggatcccagtattggatttagacgtttgagttataatgaattctctaattgttttactggaattgctgttgaattctggccaaataacgatttcaaaaaaaaaattgataaagaaaaagttgacattttaagtttttttaaaaacatatcaggaataaaaagatcactagtaaaaatattattgctagcttttgtattagagttctttgcactaatcgggccattttacatgcaattaataattgatcatgggatagtttctgaagataaaaatttaatattgttgctatcaataggttttggagtattacttgttttcgagcaagtaataaacattattcaaagcctattgactacatatattagtacaaatttgaatatacaatggaaggcaaatgtatttactcatttaatgaatttgccagtttctttttttgaaaaaagacatttaggtgatataatttcaaaattctcgtctattgatagcatacaaaatacgttaacttcttctttttttatttccatatgtaatagtcttgtttctgcaacaactattattatcatgacaatgtataattttcagttaacattaatatcaattgtcactattttcatatatataataatcaggataatatggtattaccctttaaaagaagctactaaagaaaatatcgtacaatcagctaagctgagctccaattttatggaaacaatgagaggaataagagcaataaagattttctgcaaagagaatcaccgatataattcttggttaactttatctataaatactgtaaactctgcccttaaatctcaaagactatcgctaggattttctttttccaatagaattatatttggaattcaaaacatcctaatagtttatataggtacatcttttatctttgataatacatttacagtaggtatattaatatcatttcttgcttacaaaactcaatttgagtctagaactatatctctcattgatctatttatttcttttaaaatgcttgggatccatattgaaagattatcagatattgtactatctgaaacagaattaaaatccaatatactactaaaaacagaaacaataaaatcaaataaaattgaaattaaaaatctttcctttaaatatgagggaaataataattatttaatagagaatttatattttgacattcagcctggagattcagtggcaataataggtccatcaggttgtgggaaatccacactattaaatttaatgataggaaacattttacctacaggaggagaagttaggattggaggagttatagttaataaaacacatccaaaaatcatcagagataatatcgggtatgtagcgcaagatgattcactattttctggttctattatggaaaatataactttttttgatgaacatccagacacagataaagctattaattgtgcaaaaatagcagctatacaccatgatataaaaaaaatgccaatggaatatgaaacattgattggagatatgggaactatcttatctggtggacaaaaacagaggttatgcttagcaagagcattatacaaagaccctaagatcttatttttagatgaagccacgagtcatctcgatactgaaaacgaaaaaataatttcatctaaccttaaaatgttaagcattacaaaagtaatggttgcccataggaaagaaacaatagaatccgcgaataaactaattgatttaacaaaaaaatgtgcataaccttgtgtaattgtctatttttgtacgtataatttatcaattaatacaagtgaaaaaggcattattaatattaaattgttattaatcgtattagtcgcgactagatatgacatagaacttgaaaagttgagagttacaggttttgataggggtgccgaacccttatacaaaatacaaggggtaactctcatgcttcatactaacaaccctaccattaaacataaagccagtttgttgaacctggctgaagaacttaacaatgtgtcgaaaacttgcaagatgataggcatatcccgcgatactttttatcgctatcaggaactcgtcgaagaaggaggagtcgaagcgttagttaatcgcagccctaacctcaaaaataggatcgatgcaacaacagaacaagcggttatcgattatgccattgagttccctgctcacaaccagcaccggaccagtaacgaattacgtaagaaaagcatttttatctcgtataggttgcgttttatttatttcgtcaaaacaggctacccagtgacggatttcacaccgtatgagaagataatgacctaatcggggataaatatgttttctagctgcgcgctcttgcaagttcttcatctgctctttttgcgcgtgcatagtgcactaaccaatattccagagcatctttgacagtcaccggttttaaagtttcttctattctcaattccaactccatccttggatcaaaaccttcagcgagccaccttctgcactgtccacgtttttctcttgccacttttagtgacatatcagggtaacgacctaaagtggggcgctccaagcgactaccacgcccacctcagcgatatataaatacccaacttaactgtccacttttgaaaaccttaatgctcaacccttcaccagcagcaatcatagccggagaatcccttttaacacctagcaatgcttttagttttttgtcactgagttgtttgtccgtgccattcattacctcaacatagtgtctctgtctgagtgatacaccgttcattgtaacaatcaaaaaagagacattaacactaaaatacaaaattaggctatcattttgatatggaaggataaaaaaggagaaaactgaaagcatctaatagtataaaaacacgatgttttatgcttctacagtatgtttcattataaatttaaccagttgtttttaatgaataagtatatgaaaatcaataaaggattataaccagttgagatgccaattaatatgtcattattctaacaatattgttgcacaattcctttcccttaggatatctcaaggtaagtacggcataagaataaggatgtttatagtatccagaagagaaaccaatctatatactcattatctttcaagttgcctctttgttggctgcactctctcaccccagtcacatcgttacctatgctcccggggattcgctcccttgtcgtcgcgatgcatcttgaaatccatagggtataatcgaatggtaattatcaaaagttcttcgaaaatatggggtatctcaaacaaagattaaagatggtttctgatgctcactatgtctatggcaacatctttaatttgggattaggttgtaacaaaacattagcggcaactctgtaaagcttagtttcttcatcataagttttacttatatttttcccactcacaaaatataacgtcatcccatcagcacaaggtagaatttctattaattttttccttttaagagttctaagagccttatgtaaatcatcaatgcttatttccaatgtttctgcaaggatttcatcggaacaaataaccgaactttcaataaaacagccagaattatatgccaaaaacgtatacagtgaggctgagtgaggatgacttactgctaaaactttaagctttttttcttcatcaatgattccctgactcaaagcaacacattcattgcagatgtaaacgcttggaccagcaattaatttagctacttcatcttgctttttcccacaaaaggagcagtacaaacatttttcagtcatgatgcctccaccattcaataactcatgacaaactgaaatactccaggtagcaccagttgttactgctattctttactcatagaaaacgcaaagtttctatattctatctgccatgtattgaacaacattaaaaaaagagactaccaagtctatcttgttaaatttcttcggactgatgaactacaaaacctatttgagacgttttacctcaattagatttatctttaataacttcctggaacttatcataggtttcaggattaaaaagcgatagagactctatctgctcaagcggaagaacatgacgaaactgatacacactcaaaggctttgaagttagtgtaataccttcattcctgtaatgatcagcataattatgctcggcacaaaatgtcagcgtatctttatctctgtaaccactcataaaaggaatgataacgatagtatcggtatccaaatgatgaaatctcgcttcatcaaccattccaacataaacttttctcgactttaaagtaattaacagcaacagaccactttcaattgattccaaaagaaggctttcaatagcactattagatgcaatttctttaaaaataccattgcgcttttcaggatttctaaaatctttctctgcgttataggatgcactgatactgatcaacacggtaaaacttaagatgagaaaagaaaaaatactcgtccccactaaccgagagttgaataaatcatgagcaaaagtaaaagggatatattttgcaccaaaatatacaggaatgttcagtagcatcataacagcaaagattaaacaactcagtgttaaagccagacaaaaacctgtgataagaaaaaaaccaccttgtcgtgctacttcaaagtaagcgttccaaccaatggctttattttgcttaaatctagagggtagatgactatttgtataaacataaccacatactaaaacaacaataaccacagctgcccacattgatagttatccctcttttttagtactcaaccactcaacgtttaaagcgaaagcccgctgaacatcaggattacaacgattcagagtaactgttccagaacgattaatgatgaacttttcatctttctgatcagcatcagaacaagtttctttatgtgcgccaacgaggcgtgccatcaccctttccggagaaacaagagcatatcccatattcttgaaaaaactagacatttcacctctccttcactgagtaacaaacaaccaactgtatcatagtctaatacctgcggtaatcactaacaatactttgttgtgtccatttactgctgattaagcatctatcaacaccagttcatagtagaagcaattgcgtataacctttgttctataatgtacatcctataacaataattcattgaaaagactacataactacggactataaggcacagtgaggccgactctgataagccaaaccagagtcaatctgttaacaaaattatttactaacagtaaaacccagcatcataccggtatcttcatgttctagtagatgacaatgcgccataaatggatgcttcactcccgcagtatgcttgaactgaaccagcacttcactctccttgccttccacatgaacaatatctttccaaccgctacggtgagccgcaggcttgcggccattttcactcaaaatacgaaaacgggcaccgtggatatggaacggatgcagcatcatatcgccaacacctgaaatcacccaacgctcatactgcccctgtttcacatcaaaagcgggttctgttatggagaaagcctgcccattaatggtgttcgcatgatggaaatttaattcaccaccatgatgcatatctccgtggctcatattcccatgatgcattcccatccccgccatagcttgctcaccatagcgctgagacaacatcatcatcccctgcatatccagacgactgtccatcgccagatgtaaacgacgccgattcaaaccggtaaaagagggtaatgcaggaagcgtggcaagctgctccgacagtattgtgcggctagaaaaaagctgaggttgaatacgtaaaaccggcaacggttgatcaaatggcggtaatgtcattcctatctgaaccacaggtaacgtcaccagatcgaaagatttgccatccgaagcgtctatcaccacctcaaaacgctctcccgacagaatcggtaactcattaaccgcaaccggttctgctaacaagccaccatcactggcaacaacatacaattgacggccatcactggtcgcaatattgaggctacgagcgttacagccatttagcaaacgcaaacgtaaccagccgcgtggtgcagtatgttggggtaaaacaacaccgttggtcagcatcatatcgccaaaccaaccaacagcggcactcatcacatccagttgataatcaatctgaccctcgttattcaagcgcttatcctgcaatatcaccggaatatcatccacgccccactgatttggcaaacccgtattaatactgttctcatcttcaatcagtactaatccaccaagccccattgcaacctgataacccgttttgccatgcgtatgtggatggaaccaacaagtcgcttccggttgttcaggcgtaaaactgaccgtccggctcccgccgggcgcaatcatcgcatgcgggccaccatcggcttccccagtaatctccagaccatgccaatgaaccgtgctctcttccggtagatgattacgaatatcaatagtgacaggtttacctgacatcaatttcagtgccggaccgagtaaatcaccgttataaccccaagttttagtcaccactcctgctttaaaactggattttcccgctttgatttcaatagcaattttacctgccgcatctggctctagttgtggaggaataggtaataccggataaaattcagcaaaggagaaacgactccatacaggcaacatactggataggcccataacggcacttaatctgataaaatcacgtcgttgcatattcacctcctagtcaaatcaaccaaaaaatcgctaaaaaacatcccatataccctatggatttcaagatgcatcgcggcggcaagggaacgaatccccgggagcatagataactatgtgaccggggtgagtgagtgcagccaacaaagaagcaacttgaaagataacgggtataaaagaaacataagggctacccttacaggaaggtcaagcgaagggaatgtgatttaagtcgatctttacagtaattttaaaaaataaatttttcctaacaaagatattaatatgttaacgtactatgacactggttgattataataatacaaatgcgaaaattagctctcttgacttacatactcgttcttttcggtctttcccaccccgcaaaagcgctgacagaaaatgaagctgaagatctagccgatctgacagccgtgtttatctacctgaaatatgactgtggttacagccaaattcctgatcgggaaattaaacgagccattatttattttgctcaacgcaataagtgggatttaactaattacaacagccaattgatggacaagctcaatgaagaaagctaccaagatctcaaaggaatttacctgtccaatgcgataaagtgccatgctctcgccagagattcgctgagtttattcgcctacgttaaatagtgcttttcctcatccccctaaaggggtaaatttcaccgtgcaactgtgagaattgttggctattatgtgcacacaattttcatgactgtcacagtggaggaaaagccggaatatgtcacaaaaagaaatttggtccgaaaccctgcacgccaactttggtcagtatttttctgtcgataaagtgctttatcacgataaaactgagcatcaagatttgattatctttgaaaatgcgacattaggccgcattatggcgctagatggcacagtacaaacgactgaacgtgatgaatttatctaccatgaaatgatggctcatgttcctttgttcgcccacgggaacgccaaacgagtactgattatcggcggtggtgatggcggtatgttacgtgaagtctgtcgtcatcaataccttgaaagcatcactatggttgaaatcgatgccggtgtcgttgaattctgccgtcagtacctgcctaaccataatgccggtgcttatgatgatccacgcttcaatctgatcattgacgatggtgttaatttcgttaataccaccgatcagaaattcgatgtcattatctctgactgcacggacccgatcgggcctggtgaaggattatttacctctgaattctatcaaggttgccaacgttgtctgaatgaaggtggcatctttgttgctcagaatggtgtttgtttcctgcaacaggatgaagcagtcaccagccataaaaaattgagtaactattttgctgacagcggtttctatcaagctgccattccaacctattatggcggaataatgacctttgcctgggcaagccaaaacccggcactacgccatgtggatctggcaacattgcaacagcgctttgacaacgcaagttttacctgccgttactataatccagccgttcatgtaggtagctttgctctaccacaatatttgctggatgcactatttactggatgcactatctgagaacccataatcacccattagccaggaggtgaaataaattgcacaagctgaaattgcacggttttaataacctgacaaaaagcctgagtttttgtatttacgatatctgttatgccaaaagccaagctgatcgggatagttatatcgcttacattgacgaacaatataacgctaaccgtttaacggaaatcctcagcgaaacgtgttcgatcattggtgcaaatattttgaatatcgcccgtcaggactatgatccacaaggggcaagcgttaccatactagtcagcgaagaaccgatggacccgaaggatgtagacaacactgaaaacccaggtccgttacctgattctgtcgttgcccatttggataagagccatatctgtgttcacacttatccagagagtcatcccggcggcggtatatgcactttcagagctgatattgaagtatcaacctgcggtgttatttcacctctcaaggcgctgaattatctgatccacaaattagaatcagatattgtcacgatggattatcgtgtccgtggtttcaccagagatgtgaatggcatgaaacactatattgatcatgagatcagttctattcagaattatatgactgaagaagtgcaatcacagtattacatgatggatgttaatatttatcaggaaaatctatttcatacaaaaatgatgttgaaaagatttgacctgaatgattacttatttaatgccacaccagagcaactcagtgaagctgaaaagcaggaaattacccatcttttgaaaaaagagatacaagaaatttattacggccgtaatttacccactgtttaactttcactaacttattatttaactggcagatacccatatttacaggtatctgccagatcaatttctaactgaattaacagattatcccaatttacatgactaatgcagtactcattgtaatttcagcaccgtaaatggttttaaggtaattaatagcatcttgctgatcgacaccggggaaaacacacacagcatctgatggaaccttgatttgataaccgcgtataaacgcgccataggcggtatgtctgacacaacaatgagtatgttggccggttaacaccacttccgtcacaccatatactttcaaaacctcttccagatcggttccatcgaaagccccataaaatcgcttaggcgaaacaatttcacgatctgtcccaataggtgccaatgtttcaatgacattagcacctagcgttccagccattgcatgtctgccccaaatactcatttcccgatcatcagcgcgatgagcgtcattagcataaaccaccagccaatccggttgacgccgggcatgatcaattagccgtttaattaccggtacgatcttcatcgcatccgcctcattggcgagtgctcctgtgacaaaatcgtttaacatatcgatcacgatcaacgctttcattagttttgtcctttaaatggattcttaaaaaaataatcactgccccgaataaagtcgtttattcagggcagtttaataacactgtgattatttcgatggggtcaaagaaaaggtcagtgtctctaacggttgaagggtaatcaacaccgttttattgataagcttcggcagcgagctgttctcgccataatcgatattaacgtcatataccgaaggttgatcatcaggcaattcgagatcactttgcaaatccagataatattgtttcacttcatcagcaggattgcgcaaagtaataatcgactttttcggactccaggctccccaaccatacaccgctagatcggtaggatctttaccaatccaatgggtatcaaacagcacatctttatttttctctgaccatttcgccgcgtttgccagtgtatcccaatcctctgtggtcaacaggtcaggcgtaacatacatctcttgtaactgagtgccgctgccaaaatagctccaaacctgatcggcaaaatctttaggtgactgtttatccagatgcttggcctgtttggcataaacaatgccatgcagcatcaacgaattcagagggaacagcggcccatttcttacgacattacgataagtttctgcatcacgataggtaagccactgctgcactttagaacctgtgccgtgaaactccacatcataaccaccacgccaaatagaatcggcgaaaaacagccaggaaggcgtggctttggtgccggtggtcaagttgataaacagatcactttccgtactgcgcatatcgtcaatcagatggatagcggcatcaaaatcactggtgaatgaactccctttaatcacacgatcagcattgccggtgccatccagcttaaacatggatacattttgttgttgaatcaagttgagtacccgcttatggaaattggcgtagtaattagggccagagagcgcaaatctgccatctatcacttcataaccaaactcctccgcatgagaaacacgttgctcacccggtttaccataaccgccccaaggagaaagccaaatacctaaacgagcacgatattgatctgctgcctgtttaagatttttgaactcatggggaaatgcctgactaaaaccccaatctcctttgagattatcccaaccatcatcaaacagataaccactcaacttcacaccgcgcttagtcaccaactcctgcccaaactgattgatacgggtcaacgcctcttgttcggtataaggcgtgaagtaaccaatatcgtaccaagagttgtaatgtaggtaaggactatattcacgcggacgagcattgttcaaaaactcattgacgttgcgccgcaattgccctgcctgataaacaccaatatacgtcttataacttaacgtcttccccggctctaacgggatagagagcgcaattttttgcgaagcgctccctttatacgcctcagtggtaatcaatggattaccgggaacaataaagaagctatcgctgacaatcggtgaactgacgatagaaccgtgaacaaaaggggttttagtgcgaaatggcatcaacgagacagagctgagctccaacgcattttcctgcggtgtaatagtgatttcaaacgagccgtacttatctttatcctccacagtaatgatatttcttacctgaatgtcgccatgtttcagggagacaacaatacgattgtgctttttgctaatatcagtaatctgaaaatctttagccgtgagcttttcccctgatttcaacgtgatttcaaacagattgtcgataatgatttgatcgtggtttttgggattttcaaattttaattgtgtcactttactgtgttcgtcgctaacagttacatggtaattgttaccgtccaacagccagctatctgcccagactggggtgttatacaacatggaactcgctaataaactcaacgtaattttatttaacgttcttattttcacagcagtttccttcatagtcaggatgaaaaaacagaaccttcacgaatacagcttgcctacactgccacaaatccggatcttttcttctactactgcctgcatagcctgttttcccggcgcgatatatttacgtggatcattcgcatctgggtgctgaatgaaataacgctttaccgcatcagcaaaagcaattttcagatcggtcgccacattgactttgcatacaccaagaccaatcgcctgctgtatcatcacttcaggaatacccgatgcaccatgtagcaccaacggaatatccacctgttcacagattgccgctagtcgatcaaaatccaaatgcggttcaccatgatacaaaccatgcgcagaaccaatcgctaccgccagagaatcaataccggtacgggcaacaaaggcttttgctgccagcggatcggtaaaaaaactatcggcactggaaacctgcaaatcatcttcctgcccgcctagccgccccaattccgcctcaacgctaacatcgtaacgatggcaaaatcgtaccacctcagctaccttacgaatattctcttcaaagggtaaatgcgagccatcaatcattaccgagcgcacacccgcggtcactttatgactgatatcttccaattcctcatggtgatcgagatgcaacgccagcggcagattgtggcgacgagcagcatcctgacagattgatactaggtagtcagtccccgcataactgaaagtactcggcgtacctgccagaataaccggtgatgccaagcgtgcagcggtttccgccaccacctggacagtttccagattatggacgttaaaagcaggaaccgcatagccttcacgcagggcctttttcaacatttgacgactggaaatcaagtacatataagctcctcaaatgccatccagattcgggctgtcataccctcgtttctgctgttcgtgccacaggctggttaatccccgccgcccacactccagcgccgtatcacgaaatgtttccagcgtcataccttcacggtccagcatcatctctaccgctaattgcatattggtaccggcaataacttcataacatggattagcgattgccagttgcgccgcctgccgaaacggtgatccacccagtaaatcactgagaataatgataccctcaccactatcacaggcggtgcaggccgcctccaacgacaccaataattgttgcgtactgatcccctcaggaaaatcgacagcacagcactgcggttgtcgtccgacgacttgttccactgcctgtaacaatccactggcgaaatgcccatgaccggtgattacaatacctaacattccctctcctcagtgccgtttattaaagaaaacccacaaacttccctacaataccgatcacaaccgtcaaaccaattaacttgaccggggaaaatccttttttcatcaaccaaaacaccagcaaagtgaaacacaacggcaacaaattaggcatcagtttgtccagcacatccttctgcaacgccacactggccttaccggcgtttatcaccaccggcgtcgagagatgaacataggaagccactaacgccccgattaccgtcattcctactatcgaagcagcatgggaaatctttttggtatgctttttcaacaatgccaacgcactggttcctgcacgataaccataatgcgctaaaccaaaacgcaagccgaaatgcacaatgttgaacaacaacaagaatatgatgggaccaaacaagctaccctgtagcgccagagaagccccgatacccgcgcagatgggtagcagagtcaaccagaacaatgcatcaccaatcccccctaacggccccatcagcgccacttttacggcgcgaatagtggaaattttctccttattccgttccattgccagtaccaacccagacaggaaggtgacatcaaacggatgtacattgataaactccatatgcatcttcatcgaattcgccagatcttgcggatgcttgtggatcttacgcagaccggggatcaaggtgtacaaccagcctcctgcctgcatacgctcatagttaaacgacgcctgtagcaacaaagagcgccacgccatacgattcaaatcgcctttggtcagatcctcactcggtatcgtgtcctgatagtcatcctgctcaacctgactggttgccagcgcctgcgccatcctgttctcagctttagctgccatagccgcatcggtgtcgttaaatgccatcttccatctcctgagattgagtgtgagattgagtagtagatacgctgcgttcagcggcctcttccatacgggaacggttaaagaaatcgatcagtgcaatcgcaaaagcgccaagtgctacagcaataatcggcatattgaggaatgtgactgaaatgaaacccagaatgaaataagcgatataactctttttcatcatgattttcatcagcatggaaaaaccgatagcaggcatcatgccacccgcaaccgccagaccatccaacaaccattgcggtgccttttgtaccatgacactggcagcgtcagcaccgaaatagaccggcagaaatgccacgataaagtagaagcaaaacagaatggtgatacccagataattcacacgctccacgccacgccagttcaacgctttcaccatctgatcgcatttatgcatcatgggtgagaacagggtaaacagcagggtgatgcagccttgcaccgcaatggaaaatggcaccgcgataccaatcgcgactttaggatcagcatgagtcaaaatggcaaatgccgtaccaatcacaccaccaatcaccacatttggcggctgagcccctgccagtggcaccattcccatccagaccagctccagtgtccccccgaccagcaaacccgtctgtacatcccctaaaatcagcccaaccaacggcccaatcaccactggacgatgaaaatgagtcaacccatcgaacagatccaccccggccaatccggccagtaatccaatcaatatcgcatcaatcagcataactcacccctcaaaccagcaatttggcgataggttctcccgcttcatccggcacacgccgaatttcgcaagtaacgcccagttgctccagctcacgaaacaccaccacgtcgctgtcatcaaccgaaaccgtcttatggatttgacgctttccctcagcaaaatgcatattacccacattaacaaaacggatcggtacaccgccttttactaacgtcagtacatcctgcggcgttttacaaacgataaaaatcttctggcgctcagccgctttatgaatcacatcaatggttttttgcagggtgaaataacgcgtctgaaccccatcagaaaccaccatatccatcagattttgctgcatcaaatcaccggcaacgtgatcgttagccaccaataccaaattggcccccagtgaattggtccaagtcacaccgacttgaccatgcaccaaccggttatcaattcgggtcattaaaatattcggtatcgacataatcactcctgctacattttattcttggtgaatacggtggatgataaggataaatttccacccccttcaccacgcggttgacttcccctgtcggacatggattgtctggcgttatgcccagtgccagcgaggtttcaaacgctaacatctgcaaaaatatcaaataggggaacaacagccagatatcatcttgttcactgttaatcaccgtgaaccctttcccctgagtgccactcagtgcaacaatttgacacgccaatccgtcatgattcagttcatgccacagatcgagatcataacgacgacgatactgatcagcggagagcatcatgaccaccagcgtatcccgttcgatcataaacttcggcccatgacgcacccccattgatgaatcgtaacgggtggtgacatgcccggcagtcaactccagcatcttgagcgctccctcctccgctattccagtaaagcaactggaacccagacacatcatgcggttaaaaccgctgcatgccagccgcttaatctgtgtctgccactgttccctttcccgctcacacaacgcgatcatcgccatcaacggctcatcacactgttccaacgtcaacggccctagcagcagcactgttgctaacgtcatacaactgaagctggacgtcatagcaaaactttggtcatgagaaccctggggcatattcaacgaacagacgtgagagcgcccttcggcataacgtgctaacgcaccgccgggattacaagtcagcatcaggtgataacagcgtggcaggagctgatccgccagttttaccgccgccacgctctccgggctattgcccgatcgcccataagaaatcagcaaggttgaacgtgttggatcgagatattgcaaaggagaaggcacaatgtctgtggtgctgtacgcgaccacattcagtccacactgctcacgcaaccaaggtgccagcgtgcgcccgataaacgcggaggaacctgcaccacacagcactatctgtagctgtagctctggatcggataacaaaggctgcaaaaagggtcgccataacgcttcctcacgttgcagattttgatataactgacgccaaagctcaggctgttgatgaatctctctggcagtatgcagagcatgatgctcacgcaaccaagcttcggtataggaaaacagttcattcatactaaaactccttgtacctcgggctcacaagccagcgcatagctcaagagcacagaacgaatcttatccaacacccatgagtgtgggtcattatccaaccttccggcattaaccgcctgcgcctgctccggcaggtactgactcagcagtgaaagggaaaccgggcgaccacgcaggttatccatcaaggtattcactgcctgttgtacctgcggatgcggccagtagtaacgaatgcgatcactcaaactgtattgacgatcaataaactgttgatgtggtgtaccgtggtaatagcgattccagtgctccggctgctcaagcatgacctgttccagcgtggcacgcagatgagccgcgccctgttccccattccattcaccatcgattttatcgagtgcgaacagcgcctcacgtaaagcaaaagtcaaagccggaccgactttcagaatggcaaagtgatcacgtaccaattcacggtaagcttgcgccgtttgataatcggtggaatgggcttcatagactaaatagggttgagattcaatatattgactcagtgccgctgcacgttcaggttgataatgttcgatacaatggtgatcgaactccaccccgggttgcaccaccagcgcaatcacccgtggccataccggttccaatccagccaactgccaggcttgttgatgtacactcaacgttgtcgccgcagcctgaggcgtcgtgacttgcattcctgctaatgcttctttcgctccacccggtaccggcacttcggtacctatcacataaaccggtggttctccccccacctgctgccaacaacgttctgctacctgacacaaacgagccgcacgtaccgcaacctccttgtcgccaagcggcgttggatcatccaaacaggacattgaacaatcgagatgtatcttacgaaaccctgccgccacataatcgtgtatcaacgtttcagccagtttcattgcctgttcagcgggaagatcctgccaagcattgggtccaagatgatcgccccctaaccagacacgatcacgcggtaaaccaatgcgatcggcctgttgccaaactgcatcccggaattgagccggttgcatcccggtataaccaccaaactgattgacctgattagaggttgcttcaatcagtaccgaagtcttacgctctttagcgacgcgcaaagcactttccaatacccaaggatgagcggaacagaccgaatagatccccacggcttcacctgatttatgacgacggataagttgtaatagcgactgcatggtgcctcccatgcgggcaagaatctcggtaagaactattcgtcggcaataaccacatccacgccgagttcaattaatgcccgcctgtagttatcagggatccgactgtcagtaatcagccgatgaatctgtccggcctgacggatcaggcaaaagcttctgcgcccaaatttactggcatccgccaccgcgataatttcatgcgccacctcacacattacgcgattaaggtgggcttcaccgggatgtggcgtggttatccctgcttccagatcaaaaccatcgacgccaagaaatagggtgtcaaagcgatattgacgcaattgctgttccgccgccggaccataaagcgagtaggagttctggcgtacactcccgccaagcaccatcacctccatccggtcaaaccccgccagttcataggcgatattcaacgcgttagtcatgacgaccagatcacgccgctctttaagaaatggcgcgatttgcgtagtcgtcgagccggaatcaaggatcagagcatcaccatcctgaacaaactgtgccgccctagccgcaatgcgcgatttcacatcacgattgatccggcctttatcttgcaagggacgatcaaaggcgaattgctgattcaacatggcaccgccataggaacgcaatgcacaacctttttgttccagataacgcaggtcattacggatagtgacgctggaaaccccaaaacgggtgctcaaatgttcaacacgcacgctgccctcatggcacagcaagtcgataatctgttcacgtctttttacggtatccacagccattccgttatactcctcagattttcagcaacaaatttatgtcgcctgtgatgaattgctttccctctctttcgatttaattacagcaaaagcaaccaaacgaaattgtgatcgctattacagtctattatatagacaaaaatcggcataaaaggtttcgattagaaacaaagcgaaagaaaatattaaattttctgatttctggctatttacccaaaaatcagttttcatccaccttttgggtaacaattgatatcaagaaacgaaagcgcttggttttcaatccgcaaccgcaaagttttattttgtcaggtgatagagatcacaaattttgtgattgggtgtacaaatcctgataaaatccaagcctgaaagctctcactgtaattaaggacacaccacatgacaaaacgattttcggtgctgactggcggattgctgcttaccgcttctctcggcgctcaagcctcgaataccgccgatcagacccgtctgacaaatactgttgataagaccatacactccctgatgcaggaatatgacattccaggaatggcgattgcagtgactttccacggtcaacattttttctatcaatacggtgacgcatcaaaagagagcaacacgccggtcaccaaagagacaatctttgaattaggctcggtcagcaaaacctttaccggcagcctgatttcttgggcgcaggtgacgggagccatttccttctccgataaggccagtcagcattttcaaccgcttgcaggtagcgcctttgacaacataaacttgctgaatattgccacctataccgcgggtggcctgccattacagttccctgatgagatcgacagcaataacaaaatggtggactggttccagcactggcagccaacgtacacgcccggaacctaccgccagtactctaatcccagtattggccttgcgggttatatcgttgcccaacgccttgaaaaaccttactcaaaactgatggaaaaccagatcctttcaccgcttggtctgcaccatacctggtttaacgtacccgcacaggagatgaaaaattatgcgttgggttattcaaaagagaataaaccgattcgcatcaaccccggtgtgctggatgaggaagcctatggtctgaaaaccagtgcacaggagctaattagcttcgtagatgcaaatatcgatccttcccgcgtaggtgacagcaagctggcacaggccattcgggcaactcataccggttattaccgggtgggggaaatgacgcaagggctgggctgggaactttatcactggcctgttacccttgagcaggtactgagcggcaactcggcgcagatcgcttatcaggccaacaaaaccacggaactagcgctaccagagccgccaacggatgcgctttttatcaataaaaccggttccaccaatggcttcggcacgtatgttgcgtttgtgccgcaagagcaaatgggcattgtgctgctggccaacaaaaattaccccaacgaggcgcgtattaaagcggcctggcaaatcctcaacgcgctgaaataaggtgcaattgcgttaaatactgtgtctattagcagtaacagcgcctcccgcaggaggcgctgtcctaacatatcaagtcattaagccagtaaagcttccaaacctgcggtcactgactccatacggtgaccgcctgaatgctcaatcacataacgcttgcctacctgagaagaggcatccaagccccaaataccatgttcggccttctgactcagcggatcgctactggtattgatgtgggtgacattggcactatccaacttgtcggccaaccgatctcgcaaccctacatgcaatcccatgctgttaaatgcagtgaccttgatcccatgcttgatgcccgcatattgtgctagcccgccgcccaaggagtgacccagaacctcaaccttaccgccatattgtttagtaaaggctttgaccaagcggtcagcatcctgaaacgcgctgtccttgatccccaaagcagcgccgacatcactcttcaccgtgccagggcgcttggtcggctgagtgcccacaaaggagagcaccatagtgtcgtcactcttatagacagcaaccttgagcgcagaccagctatctccctcaaggattaaaggatcattctcccctttgctggggcgaacatgcagggttaactcactgccggttccgccagtgccatcctcccggcgagccaatatcgaggacgggatatcagctaaagtggcatgactgtaacctgctggcatatcccgatagctactggagcaactgattctcgccaattgggccgcatccattactgctttagctcccacagcattcaacggctcttgttctgctttagccacaaacgcgggtttggcgatcaccttggcagaattcagcaattgctcggcacgcgttccagcctgcaaacgatcggacgcgccaagaggtaagtgcgagactcccttcgcgcccgctccagccagccccaaggcagaagatgccagcaaacgccctgtggattccgccaggtttttaacgcctacaacaccgaccgaaattgcaccgctcgttacactactggtgccgcccgtgatattagccaatcccttgataatggccccagtccagtagcgcgccttacctttggcactctgtgcgtgggaatcatgtcctccctgtatggcagtgccaatcttgcgagccggagcactcaatgtcagatatttcagtgtagtggtcagcaccttgcccggcgacacctgagtaccaagacccgtactggtgtaatgggaagcaagatgatgatgaacattattattgcgagatggtgtctgtacctctccgttcgaaaggggcgacaatgccgtcgttttgaaagtttgcccaagactttgaatagacatcttattctcctttgctattcagataaccgctactcagcatgcgatggctgagccaagtaatggatgcggcgcagacgctccgttctgctgggtgttgatcgcctgaaactgggcctgcaagctgacaccaagatcgagaaactcacccagagtttgcataaatgcagtttcgtcgaacatctcgatcaacgcagagaagctcaacaccagataattggtacgactgtccagactgatctgactgccgccggtggtgagaccgaacatattcagctcaagggcagcccgagtcagcatcaactggcccggttcatctacaggtaatcgcaacaaaggaatatagagataaaatgcctgaacgtcgtcgttatccggtacttcaacgatgcactctccaccttggccgaaaggcactgtacagtgatcatcgccgccaatgctcaaagccacgccttggcgctcacccacaaggtgcaaccattccgatactgtctgttgatatgctttcactatgatgttctccgctcgttatcccttacagaccaagggcttcgcacgcaatagaaagtgtgatcatgttaacaatcactggcaagccgtgatttatccctagggcgaagttttttatatcgacgtcgaaatagcgccttatcggcagttgggttgcaccatgcaaatgcggttcgaatccaccgtacccaacttggctgacaggtgttgtcccagtagtgtaggttaattcatatgagttgtacgggctggatcgtattcccaccaccactcaaaagagggaagccgtgacgactcaaaactttccagcagcaggatatcggtgaacaatcccccttcaaatagattgtcgcaggaaagaccactgacggaacaataacgcttattatcacgcacccaaatcaaactaccgctgtaataggcagtcaatccattaatgtaatcacgaacctcaggagatgcggtaatcaatacctccttttgtaaccgcaagaacaagatgagttcccaataatgctccatgctctgttcaaccgtatatacccgttatctttcaagttgcctcttattaattaaagaattcaatatgaaaaatcggaattgagaacgattaattagccattttgcgtgatatttatcacattttttcatgtccatatgataaatatcgtgatcttgtggtcataatatttagagagtgaaattctctgttatttgtctccactccatcctactcagttggacgcggtctattgttctctctaacgccacgtattaaatgatggctattttacgctgtcatttttttaccgcggaacagaccggcgctatttaaaagagccgcttgtaatggctcgtttaatggcttcttacgttatccccgtctcaggataatggttcaattatgtagggtttcaaatatggatggattagttttcacctgccgaattggcgcactgccccaaaccacctttcaggtcgcgcaatttactttacaggaagagctgtcacagctttatcgcctgacgttaaaggtggtgagctcacgtgatgatattcccctgaatgaacaactgggggacagtgcatcattggtcattacccgtaatggcatcaccgaacggaccattaatggcatgataaccggcgctgaacagggtaataccgatggtcgtagcactttttatattttcactgtccgtcccacaatgtggctgatgacgctcaatcaggatagccgtattttccatctgaagtctgtacccgaaatcttaacgatcttgcttaaagagcatcgtattttatttacccgcgatacgctctataaacgccatgccgaacgggaatacaccacgcaaaaacgcgaatccgcttatgatttctggtgccggctggcggcggaagagggcattatcttctggtttgaggaagaacagacgttgttctgtgattgccacctgggcatgcaggcggatatcgctctgacttacaatacgcatcctgaaacggacgagaccgataccacggcgtaccagtggagttatggcgaatacctgtgttcgaatggcacggtccagaaagatcataactttcttaaccccaaatattcgcttgagcatcagaagcaatccgacgatagcgggcaccattcggtgtttgaaagttacgggcgtttccagtgggacgaggaaggaaaaccttttacccaattgcggctggaacagttacgaaactacagtaaagtcggtaccgccaaaaccaactgtatccggctgcggccgggcaaaatttttaccctgcaatcccatcccatagaggccatgaacgaccgctggcaggtgatctctgtcacgcatcatgggtggcaacctgtcgcgtcaaacggcgggggcgaaggcacaacactgaccaacgaggtcgcctttattcccggaaaccaggactggcggcccccttaccgctacaaacccctggcggacggtgatgaagtcgccacggtggtcggggtgggaagcgaagagatttatgtgaacgaacacggcgcgatacggatccatttccactggaaccgttacgataaggcggacgaccacgcgtcttgttgggtgcgggtggcacagggctggaacggtaacggtttcggttttatggcgataccgcgcgtcgggcaggaggtgatcgtcagctatctcaacggcgatatcgaccgtccgattgtaacggggtgtacctataacggcctcaaccgcccgcctcttaatttaccgctggagaaaacccgtaccacctttaaaacccggactctcggagggcagggatttaatgaactgcgctttgaggatgccagaggaagcgaggaagtgtttattcatgctcagcgggatatgaatacccagattctccgggataaaaccacgcagataggccatgaccagcaaacagaagtggcgcataaccgtaccgcgataattaaaaacgatgatgatgaagccgtgcagggcggccagacgcttgaagttggtcagaatcaaacggtgactattaaaggtcagcaagccctttccgtgggtaaaagccatcaattaaacgtcgccgataaccagcaaattactgtgggtaaacatatcacggtgcactctgaaagcgggcaaatcaccattgggaatgcaggcggacagatagttattgacccgatgggcaatatccgcatcgaaggggtcagcatcaccatgaccgaccatatcatcggcaagaaatccgccggtgcgctgtttgactactccgcccgctataccctgctgagtgagcacagcgataagccgctggtgaatgtcccctacaccatcaccaccggcgagggtcaggttatcccgggtaaaactgacgcgctgggcagaacggtgacggtgcagagtgaggcggaagaaaatctgcaactgagttcaccggaagcctcaccgaaacctaagcaaaccttataccgagtcagcggtaacacgcagatagagtatgtgatggaatttacggagaaataagtatggcaatatctaacagtggtaaaatgtgtccggccgtgacctcaattaactgtacgatggaaataggggtctttcccgccgatgaagatccctgttatctggcggaaaaagccgagtatgccctgcgcctgccggcaatgattatcaccaaactgggggctattcgctttctcaatcaagtcattatgagtgggttgattaaggttgaagagcttaagcatgactttctgtggccctataaagcagaagtagtgtttgctatccgaggagagcaagatgtccccttacccatgctggcaaccagtcaagactctaagcaacgttatggtgataatttaccgcaatccagtaatccgtttgcccggccttctgccgaagacgcggagaaatttggtgttgttagtatccgccggcccgatattattctggttaaagaggaagctctccgctggccgggcagaaatgccacctacttcgatggttctgtgcaccctgataatttgaagatgttgattgaggtgaaatttccgggcgataaacttgctgaagatcaagaaatagattacatacagattgcgaccgaagatcgctttggtgtaatgcgtatcagcgataatcgcacagaagagcaaaaacagtatgacgaagcgtggcgaaaacattatcaacccgactcccaacactataaaaaccccatacctctagccccgctgccacccggttcgccgcctgatgatgaagctttacccgctcctcccgcagagggtgtgccggggactattccgcagccgctgacaaaaaatccaccgcttctcagcacttcccgctggtcgtttttacccagctatgaagactgggttgtcctcgggcaggaggtggctggtctggccgaaaatgggctgaattatgtcctcgacagtacccgagagcttcttgcccagtttggttcatggctcaatcaaaccggcaagtgggtgtgtgaagagattattgacccgataagccatcagatcagctacgctttttcctgggttaatgaacaaacggggaaaatcgtgacctggacggagagtgagataaaagcccggtggcagactgtgcaacagggttcagacatcaccctggaagagcttaaaaacattagctggatgcagatattgaaagaggtgggggaaggcatgctggaaatggtggtgattattgccggtgttgccgttgttatcctggtcactcttgccgtcgctgctgcgctgattgcactggtggaaattttagccgcggctgctgcggtaagcgccgctgcgttagctgccgttctgacaatattggcgagtgtgacattcgccaccgcttcataactaaatggaaaatatgatggaaactgtagattactttgcccagttgagatcacaactggccgcgtttaccttcctcaatggtgatgggctaaccatttctcgtcttgggatttctatcactctgttttttaaacagggctacactcaggagaaaaaacaacgcattctggcctgctaccggcgctttcgggaggagttcggtactcatctgcgttttcacagtcattcattaaagggattaagcaaatattcaccggaaaatattattaagatggaggaaggtattctcgccaggaaaaaaaaccagctctgtggttgggtcgttagtgatgctaaaaatgaagatgaggcacctaagtatctgatgcgttacctagattcccgagaaattgatggtgatgatggtagctcctacctgagtctagtgctgccctgggattatctgaaagaacaagagggcatgacccggtttatggcctggctggactttctgtgtgaacaactcgaaccggacagtggagactgtggctactgtctggtcctgcccaaagattattatgattactttcccttagagtaccagctagcgcagcgttaccccgcattgcaggttaattctgcggttcatacagccaaattacagtatggacattccatccgtggcattaattggatcaccctgctgtccaaacgatttgtaaaccgactgggtggagaattctggatacgtcaggtgctgcgcccctaccgggatgtggtgattacttcttaccgtgatggcctgattatccgggccggtgaatacccggacttaaccccactcccgggcagtgtcccggagagttattttgctattaaccagttgatacgtccgatacgggtgatacctcgtgaaggccattcattgcacttctatggtgaaggtcattttaattcaacttctaccctggcctggtatgcccgttatgaccgaagtccgctgcaagtgacccctttgaaaggtgaccatccggcactggtcagcgggatctggcaaaccgacagcctgcctggcaggcagtacttctttgctcagggtgcgatggcttttgatgttgaaggtgcagagacgggtacaactatctggcatctgatacgggaagcggcaaatatgtgggaataacagattatccaccgactcatcactcacggagaaaatgatggaaactgtagattactttgcccagttgaaatcacaactggctgcgtttaccttcctcaatggcgatgggctgactgtttcccgtctgggtctttcgattaccctgttttttaaacagggctacacccaggagaaaaagcaacgcattctggcctgctaccgctgttttcgtgaagaatttggtactcatctgcgttttcattgtagtggtctaataaaacctaaaacctaaagtaaacaaaagcctagtcgattctttacataaacagggcaagaaaaatactaagatatccctaattaactcaacctattttggaaaagataatgccaatctcacctattagcggccatatgccgcttagccaaatacaagttccgcaacatgccacaacttctcctctactcgaacagggcaatcgtctgttcgaacagtctgttcggcgtggccctcttcactttcagagttcgtcgctcaaacatttgtgcgccgagctgcgccaattgcagaatgctcccagcagtatgcaagcccggcgggtgcaggatgctattcagcactgggagaaccaccaccccaaagaggtgatggcccgtagtacccgccttgctgaacttaaacaggctctggcagaacaaggcaccgtggggcgcactctacaatcaaaggtgatggcaaccggtccccaagtaatattaaaacagcccatgccggccttaccacaatctatcgccgctcagatcaccaaagcccagactggctgcaccaccaccttggtctcctccgcgacagccgaactgataaagcacaatcaaaacaaccaacagcacatcaaagacagtgatggacgaaagcctgttaataacatgccaccgcccccaccaccgccaatggcagataaaacgcaaaaagtaaagaaatgggtagtcaatacggactctaagcagctccaggcactcaggtattattccgcacagggatataatcttataaatacctacctgcgtggaggagagtacgttaagcatcaagctattgaaacattattgtcgagaaattacttacacagtaatgaaccaacgcctcaagaatttgatgcaggaatgcgtgcatatattcaagacgtcacagagggattaaatgagcttgctatcacggatcataaaaaagtttatcgcgggttaaaattcgataaatcagaacttaagaatttactggatcaatatactacagagggaaacatcattgcggaaaaagggtttcttagtacctcgccagataaagcctgggtcaatgatactattctggtcataaatcttgagtcaggccataaaggtcgtattttaggggacgcagctcattttaaaggagaagcagagatgctattcccccctgagtcaaaaatgttagtggagaaggttttgaatcgcgatgataaagaatttgattcccacttttcaaatctgagactaacagatgatgcgtcagcagataccacaaggattaaaaggattattaatataaaaatgctgaacgaataaaatcacccgcccagaaaacggaacttcagggcgcaaaattttatgtgaaaagagatattaaagattttataccttatggatttcaagatggatcgcgacgacaagggagctacttattttattgcaggttaacccttttattattaaccaaattaaatctacttgatgttatttcaacacgccaaacgggcacgttgtcattgtgccagatattgtgactgctccccgccgtaaagaggatgtcgcaaaaggccagcattgaaaataaacccgcagagatgtattaattaaagaattcaatatgaaaaatcggaattaatagcgattaatgaaccatttcatgtgatacttatcacatttttttatgtccatatgataaatatcatgatcttgtggtcataatatttagagagtgaaattctctgttatttgtctccactccatcctactcagttggacgcggtctattgttctctctaacgccacgtattaagtgatggctattttgcgctgtcatttttttaccgcggaacagaccggcgctatttaaaagagccgcatgtcatggctcgtttaatggcttcttgcgttatccccgtctcaggataatggttcaattatgcagggtttcaaatatggatggattagttttcacctgccgaattggcgcactgccccaaaccacctttcaggtagcgcaatttaccttgcaggaagagctgtcacagctttatcgcctgacgttaaaggtggtgagctcacgtgatgacattcccctgaatgaacaactgggcagaagaaaatctgcaactgcgttcaccggaagcaacccccaagccgaagcaaaccttataccgtgccagcagtaacacgccggtagagtatgcgatggaatttatggagatataagtatggcaatatccaacaacgacaagatgtgcccggctgtcacatcaatcacctgtacgatggaaatcggcgtctttcccgccgatgaagatccctgttatctggcggaaaaagctgaatatgccctgcgcctgccggcaatgattatgaccaaactgggggctattcgctttcttaatcaaatcattatgagtgggttgattaaggttgaggaactcaaacatgactttttatggtcctataaagcagaagtggtgtttgctatccgggggaagaaggatgttcctttgcccatgctggcgaccagtctggcctctaaacagcgttatggcgataacttaccgcaatccagtaatccgtttgcccggccttctgccgacgacgcggagaaatttggggttgttggtatccgtcggcccgatattattttggttaaagaggaggctctccgctggccgggcagaaatgccacctacttcgatggttctgtgcaccccgataatctgaaaatgttgattgaggtgaaatttccgggggatgtgctctctgacaatcaggaacgagattatatccagattgcaacagaaaaacgctttggggtaatgcgcatcgacgataaccgtacagaagagcaaaaacagtatgatgaagcgtggcgaaaactttatcagcccggctcccaacactataaaaatccgatcccactggccccgctgccgcccggttcgccgcctgatgatgaagctttacccgtaccgcccgcagagggtgtgccggggaccattccgcaacccctgacaaaaaatccaccgcttctcagtacttcccgttggtcgtttttacccagctatgaagactgggttgttcttgggcaggaggtggctggtctgactgaaaatgggttgaattatgtccgcgacagtacccgggagctccttgcccagtttggtacctggttaaatcaagctgggaagtgggtgtgtgaagagattattgatccgataagccatcagatcagttacgcgttttcctgggtcagtgaacaaacgggaaaaatcgtgacctggacggagagtgagataaaagcccggtggcagacggtgcaacagggttcagatatcaccctggaagagttaaaaaacattagctggatgcagatattaaaagaggtgggggaaggcatgctggaaatggtggtgattattgccggtgttgccgttgttatcctggtcacccttgccgttgctgctgcgctgattgcactggtggaaattttagccgcggctgctgcggtaagcgccgctgcgttggctaccgttctggcaatattggcgagtgtgacattcgccaccgcttcataattaacggagagaaaatatggaaactgtagattactttgcccagttgaaatcacaactaaccgcgtttaccttcctcaatggcgatggactgactgtttctcgtctgggtctctctattactctgttttttaaacagggttacaccctagagaaaaagcaacgcattctggcctgctaccagcgttttcgggaggagtttggtactcacctgcgttttcaccgtcatgagctggaagggctcaaaaaatattcaccggaaaatattgccaaagtggaagaaggtattcttaatcagaaaaaaaaccagctttctagttgggtcgtcagtgacgccaaaaatctctatgaagcgcctcgttatctgatgcgttatctggattcccgagaaattgatggtgacgatgatagctcttacctaagcctgacactgccttgggattacctaaaaggacaagagggcatggctcgttttatggcctggctggagtttctgtgtgaacaactcgaaccggacagtggggactgtggctacagcctggtcatccccagagactaccatgactactttcccttagagtaccagctagcgcaacgttacccctccctgcaagtcaattctgcggttcatactgcggtattacagtatgaacactccattcgtggcattaattggatcaccctgctgtccaaacgatttgtaaaccgattgggtggagaatattggatacgccgcacgctgcgcccctaccgggatgtggagattaccccttattccaatggtctgatgatccgggccggtcaatacccggacttaacaccactgccgggcagtgtcccggagagttattttgctattaaccaactgatacgcccaatacgagtcattccccgtgaaggccattccctgcacttttatggtgaaggtcattttgatgatatttccacactggcctggtatgcccgttatgaccgtggaccgctacaagtgacccctttgaaaggtgaccatccggcactggtcagcgggatctggcgaaccgacagcctgcctggccagcagtacttctttgctcagggtgcgatgtcttttgatgttgaaggtgcagagacgggtacaactatctggcatctgattcgggaagcggcaagtatgtgggaataacagattatccaccgactcatcactcacggagaaaatatggaaactgtagattactttgcccagttgagatcacaactgaccgcgtttaccttcctcaatggcgatggactgactgtttctcgtctgggtctctctattactctgttttttaaacagggttacactcaggagaaaaaacaacgcattctggcctgctaccagcgttttcgggaggagtttggtactcacctgcgttttcaccgtcatgagctggaagggctcaaaaaatattcaccggaaaatattgccaaagtggaagagggcatcctaaatcagagaaaaaatcagccttctacttgggatattagtgatgctaaaaatatctatgaagcgcctcactatctgatgcattacctagattccgatgaagatgatggtgacgacagtagctcttacctcagtctggtattgccctgggattatctaaaggaacaagagggcatgacccgattcatggcatggctggactttctgtgtgaacagctcgaacctgattggggagactgtggttactgtctggtcttgcccagagattatcatgattattttcccctagagtaccaactggccctgcgctacccttccctgcaagtcaattccactgttcacaccacactggatgattatgcccactccatacgaagcattaactggatcaccctgctgtccaaacgatttgtaaaccgactgggtggagaatattggatacgccgcacgctggcaagctacccagatgtggtaatcagcccttactccaatggtctgatgatccgggctggtcaataccctgacttaacgccgctaccgggtagtgtcccggagagttattttgccattaaccagttgatacgcccgatacgttttgttccgagagaaggtgattccctgcatttttacggtgctggtcattttaattcaacttccaccctggcctggtatgcccgttatgaccggggaccgctacaagtgacccctttgagaggtgaccatccggcactggtcagcgggatctggcaaaccgacagcctgcctgacaaacagtacttctttgctcagggtgcgatggcttttgatgctgaaggtgcagaaccggggacaaccgtctggcatttaatacgagaaacggaaaatacaacggagtaaataatgcgcagtgtagtggaaggaaaaaaaattatccttaaaggtgataccacaacaaccggaggtgaggttttaaagggttccgatttggtaaaccaacaactatcggttgcctgtaaaggtgacccggtgttttgtcccgcctgtaaacaaaccggcgcgattgtggaaggttctaacttgttcaatatacaaggaacacctgtcgcgctggagggacattttgttaattgtggttgcccgactggcgtttgtcgattaaaggtacggtcataactatcaaatgctaaagcctttaattggaatacccataaaaccggagccggttttaaactgtgattaaaagttatttttttaacctatgattttaatcgatatctggttttaatctttttttatcttttggatattagctttttgctaaatttaaacattatgatatataccctatggatttcaagatgcatcgcgacggcaagggagagaatccctgggagcatagataacgatgtgaccggggtgaacgagtgcagccaacaaagaggcaacttgaaagatgacgggtatatcgtggttttacgtttaaacgaacgttaatcatatccgatttattttgactggcactgttttaccgatgttgttttaccaatatttttttaccaatattgttttactggcaattctgcgagcttttataaattatcaccttttgttttttctttattaaatcactaataaatagttttctagtatagagataccattaatgttttttaggataacgccttttcagcgcttaaatccagctaaattaatcgttttatctcttctttaatcgcatttttattgattttttcgtaaaacgatggtgaaaaaatactttaatgtcaatctattctattaatgttattttacgtgattattacttttcaactctcggttaatggttagtgaatttcgactaaatgtcattaattacgctactgaaaattttgattttcttggttaaatcagtctgtttaataaagtgattaatttctctgtttgtctttttaaatagtcatgactggttaggtaaatgtaaaataagtggaggatagtattaccgatttaccgataaatggattaaacatagcagagaataggttgtttttagtcactttatgttttttaaaaaattggcatcaatggtctacctattttttaacccttagttgattaatcaccggtaaaagggaaatgtaagttaaaaaagtaatgttaaaaatatgataagattgtactgtagttttcattctgatggggtgcttatttttaattggaaacctgttatgacgaacggtttttattgcttaattgtggtaagtttaatagcttttacattttctgaatcgtatttaacctccttgttttcattaaactgatatttaggttttctcgtttctcgtttctctttttctgtatttgattttttaggtttaaaaccagtgagggtggcagaactgctaacgaaattaagattaacacaaatttctttaatcatttttaatattactaaacattcttgcttttctggggttaatctaaaggccgctcggttttgtctctgatttttcgtaaacttgttgcagtcaggcaaaatcttttatttaagaaaattggtttaatactgttaatactgttaatactgttaatgctgttaatgctgttaatgctgttaatgctgttaatgctgttaatgctgttaatgctgtcattttttccaccttatttaatcaatttaaaacctgttttttctgatgttttctcttccaatgtcagcatgacataggactttttacccgcttttaaaaatccttaatcaattctttttacttttgatgattaacgtttttacctgttttttcgtggttagcctggcctcttttccagcttttaaaaccacactgatagataaaaaaggctttttttaacaattgccccgtaaatcctagccctaatggagggtttacggcgatttttgctaatccccatttttctggctttcgccacgccagtactcagagcataaagatggctcataaacgcatagttaacaaacaatcctttccctccatcgacttagtcatccatcaactcactaaatctgttagctttcttgcagatttagttgattaatttgcacaacctgccttttcctgcacatcatgcaacttattgcatttaccattattcattaaaaaatcatgattaaagttgcacttattgacgaccacgtagtcgtccgttccggttttgcccaattactcacgcttgagaatgatcttgaaatcgtcgggcaatacgccaatgccaaagaagcctggtcgggtttactcagaaacccgattgatgttgccgtgatggatatcgctatgccggatgaaagtggtttgcacctgctcacccggttacggcaaaaacggcctgatttccgcactattattctcagcatttatgacaccacagcatttgttcaaagtgcgctggatgccggtgcctgcggctacctcaccaaacgatgtggcccagaagaattagtacaggcagtacgttccgtacatcaaggcgggtgctatttgtgtgccgatgcactaaaagcactgcgtcaaacatcacagaaggttacagcactgcaagtcctaacccccagagaacgggaaatatttgatctgctgatcaatggcattaatgttaaaactatcgcagaacaactctatctcagtcataaaacggttcatgtgcatcgtgccaatattctcagcaaactccagtgcgatagcaccattgatctggtccattacgctctgcaacaccagattctcatggggaatccatgaacagaggatcacgatttggcctgttatcactctttctgctgattttttattcgctgagctggcttgctctgtggaccatcagcttctacctgaatgacaatgggcaacaagctgcactacttctgccacaagggttgcggctagcgctgtttatcctactggggcgtcgttacttacccaccttgttagccactgagattaccattttgctatggcttagcagcgaacaacttattactcacaatatcattctgttatccccctttctcagcctaatacccacctttatcgtgcaacaattttggtggcgctatcccctatattggcaacgactctcaattctgctggctggcgtcgccgccaatagcgtattgcaggctatttgtctaggatttacgctgactgccggtgccagccacctgtttctcacctcgttaaccggtggcgttttattgtcaccttttgtttatctgatctatgaatatctacgtcagcaacatctaaaaaatatgttgcaaccgagtgaccctgatccgcagttacgcccttcgttgttgatgtggtgttgcctattctgcttgctaggattgagcgcccagatctttatgtcaccagaaattgaaagccttttggtgattctcatatttatccctaatgtctttatggcctaccgctacggctggcaaggcggcgtactggcggctttactcgggagcctaatgatcacatcagctcgacaattcagtggcgcttttaacgatttaggtgagctggaaatgttcctgactattcaggctttattaggcataggtctggggatagccatcagccgtcaacaacagctcgctgaaaatttacaacgttaccgtgaactcttagagcaggagttaactgcccgccataatctgatgaagaaactggttcacacagaagaagacgtttgtaaaagtattgcccgtgagttacatgatgaaattggtcagaatattactgccattcaaattcaggcaacgctgataaaacgtaccgccaccaccccggcaacagaaatgatcgcagaacagatcaataacctggcccaacaaattcatcaatccacccgtcaattattacgccaattgcgcccgccggttctggaagagatgtccttagaaaaagcacttcaccatctgatccatgaattggcatttaaagaacgagatattgattgccagttgaattaccagcttccgcaaaatccaaccaatgaaacggtggtttttaccctttaccgtctggttcaggagttactgaacaatatcagcaaacatgccaaagcgactcgaatcgctatcatcctgcgacagcaccgggatgtgattgaactcagaatcagtgataacggcatcggcattacagaagataaaagaaaaggtggatttggcctccaaggtattgaagaacgtatccgtgcgttaggtggcgattggcagttaagcaatgataacggcacgcgtataattgttaagctgcccacaaattctgatgaaaatcaggcataactaagaatgattcctagttgcctaaaaccttatcccatccattttcatcaacctttctttatatttccttctcatggaggagccgggtatgcaagccaccagtcaggaacagatttcacaacactatcgccgctggcgcagccgtttgctgatttccatgatcattggctatgccgcattttatctgacgcgaaaaagcttcaactttgtcatgccggttatgcagttggaactgggactggataaaggacacattggctggataaccactctgttctatctggcttacggcagctcaaaatttatttccggtgtatttcatgatcgcaccggctatcgctggtttatgggtgccggattagtgatgacaggtgtgttaaacattatcttcgctttctgttcatcattttctgccctgctgatcatttggacactgaacggcttctttcagggctggggatggcccccctgcgccagattgctgacacactggtactcccgcaatgagcgcggcttctggtggggatactggaatatctccatcaatattgttggcattactgtcccaatgctgtccgcttttctggcgacaacttatagctggcaaacagcgctgatgatgccgggaattatcggcattttattaggcatctggctttgctatcagttatgtggcaccccacaacagcacggtttgcccagtgtaggacagtggcgacaggattcactggagcttcgacatgaacagctatcgcaccccatgccgatgatgcagatactgcgggataccatcttaactaacagaactatctggttgctaggatgctcctacattctggtttatctcatcagaatggcgattaacgattggggaaacctgtggttgtcagaaacacatggtgccaatctgctcagcgctaatgcgacgctctcactgtttgaactcggtggtttaaccggtgcgctattttccggttggggatctgatttactgttccgcggccaacgcgccccaatgattctgctgtttgctcttgggctatttatggctgtcaccgcattgtggctcactcccattcatcactacacgctgttggcagtctgttttttcagtatcggtttttttgtatttggcccgcaaatgctgattgggctggctgcaacagaatattgccataaacaagccgccggcaccgtcacgggttatctaggattgtacgcctatttgggcgcagcaatcgcaggctggccgctaagtcaggtggttgcccactacggctggtccgggatgtttgccctactcaccgccgcagccgccatgatgggtttgctgttgatgccaatgttaatggcagacgtgagtaaaagggaacatggagtagcatcgcgactttccaataataagcagttttgaatataaggataaaatgatgaaactgaaacctctctctacacttatcgcagccggtctggtcgttgctgcatttaccaatagcgctcaagccgccggacgtttgatcgtttattgcagcgccactaacgccttgtgtgaaactgaaaccagagcattcggtgaaaaatataatgtaaaaaccacttttgtccgtaatggttcaggcagtactctggcaaaaattgaagccgaaaaacgcaatccacaagcagatgtctggtacggcgggactctggacccacaatctcaagcgggagagatggatctgctagaaccttataaatcccctaatctgacacaaatcatgccgcagttccgcgacccggctaaacgcaaaggcaactacagctccgccgtttacgtcggtattcttggttatggcgtcaacactgaacgtctaaaagagaaaaatctgccgattccaacctgctggaaagatctcaccaaaccgatatataaaggcgaaattcagattgccgatcctcaaagttcaggcaccgcttacaccgcgttggcaacctttgttcaattatggggcaaagatcaggcatttgattatctgaaaaaactcaataccaatatttctcagtacaccaaatccggtattgccccagcccgaaatgccgcccgtggcgaatctgcgattggtatcggtttcctgcatgattactcattagaagtagaaaatggcgcaccactgaaacttatcgcgccatgtgaaagcaccggttatgaaatcggcggcgtaagtatcatcaaaaatgcccgcaacatggacaacgccaaacggtttgttgactgggtgttatccaaagaagcacaagaattgagttggaagaaagggaaagcttatcagatcctgaccaataccacggcaaaagcttctcctttggcgcttaaattatccgatctaaaactgatcaattacgacatggataaatatggtgccaatgatgtacgcaaagagttaattaccaaatgggtgacagaagtgaaaatggcgaaataaagtcagtcaagggcggatcacctccgcccttagaagctatccgtcaggctactttatgttcccgcaccaatggatagcttcttactgctgctaccacacaataataaaatggaaggaaattatgtctcacgcattcagacaaaagcaggatgccgtgttctggtggattgccctaatgtggttggccttcgcgcttctgccatcatggagcctggactacggcctttttgaatctactcaagatgaactgctcgccgcctacggctggaacggattaaacatcagcttactgtggttcctgctgccttcagcgctgctattacgtccactcacaccagcaaaccgcaatcaaccttaccgccactattttgacgcgggttatgccttactatgcgcgctatttgtggttattagcgcggccattatcggtcgtgggctgggctacgctacgattttcctgtttatctcactgggcgcgatgattactctagccctgtctcgccttgaatggctaggtggtgatagttttgttatcggttcattagtcgcagttattgccctcatcggcctatttatcctttatccgagtattgccatctttattccgatgtttacggatgatgccggtcagtttgccccatttgcttttatatcgatcctagggcaagcacatattattcaggttatcatcaactctgttctactttcgctggcggttggcgcaggttgcaccttcttcgggttggtactggcaatttataccgccagaatcgcccgccgctccgccattattggccgagtattctccatcttacccatcgtcacgccgccgtttgtggtcggtttaggcgtcaccctgatgatgggccgttccggttatatcactgaatttatggcaacctggtttggcctaaccaacaccaactggctgtatggctttaccggcatctggctggcgcaagtgctagcctttacgccaatggcatttatgatccttgatggcgcaatcaaaaccatccatccctcattggaagaagcggcttatactctgcgtgccaatcgctatcagacgttcttcaatgtttttattccgctgttgaaaccggcactggcgaacgctttcctgattgtcattgtccagtcgctggctgatttcagtaacccattggtactgggcggtagctttgacgtactggcgacccagatctatttctatatcaccggttctcaactcgactatcaagccgccagtactctcggcgcttcgctgctggttttctcgctgctggtcttctgcgtgcaatatctgtggattggtaaacgttcctacgtcacggtttccggcaaatcctaccgtggtgatgtacaaccgttgccaacgtcactggtttggggagtctgtgccatcctatttatctgggttgtgttcaacattttgttatacggcagcatcttctacggcagtttcaccgtcaactggggagtggattacaccctgaccttagataacttcatcaaactatttggtcaaggtatgcacgatggcgcatggccatcattactggataccctactctacgccggtatcgctgcccccattactgcgatcctcggtctgttgattgcttacattgttgtacgccaggaatttcgcggtaaaaaaaccatcgaattcaccactatgctgtgctttgccgtaccgggtaccgtcgctggggtttcctacattctagccttcaacgattcacctttttatctcaccggaacggcggcaatcgtcattatctccatgaccatgcgcaatgtgccggtaggtatcagggcagggattgccggtcttggacaaattgataaatcactggatgaagcttcactcagcctgcgcgccggatcgatgaaaaccatccttcatgttctgttacccttactgcgcccggcgattttatctgcactgatctacagctttgttcgtgcgattaccaccgtcagcgcgattgtcttcctggtcacacccgacacccgcgtagcaaccgcttatattttgaatcgagtggaagatggagaatacggagtagctatcgcttatggctcgatcctgattgtggttatgctggccattattttcttatttgactacctgattggcgaagcgcggatctctcgttccaaagccaaaaatacacagtaatcacggagtgacaacatgacacaacaaaattttgtcgaactgaaaaatgtaaccaaacggttcggtaacaacaccgtgatcgataatctggaactctctattccgcagggacatatggtcacgctgttaggaccatccggctgcggtaaaaccaccgtattacgtctggttgccgggctggagaaacctagcgcaggtaaaattttcattgacggtgaagacgtcacagatcgctctattcagcaacgagatatctgcatggtatttcagtcctatgctctattcccgcatatgtcactgggggaaaatattggctacgggctgaaaatgctagggcagcctaaagcagaaatacgcgaacgggttaaagaggcgctggagctggtggatttaggcggctttgaagatcgttacgtagaccaaatctccggtggtcaacaacagcgtgttgccctcgctcgcgcactgatcctcaaacctaaagtgttacttttcgatgaaccgctgagtaaccttgatgccaatctgcgccgcagtatgcgcgagaaaatccgcgaattacagcagcaatttaatatcacctcgctatacgttactcatgatcaaagtgaggcatttgcagtttccgatgcggtactggtgatgaataaaggtaaaatcatgcaaatcggcacgccacaaacactctatcgccaaccggcgtctgaatttatggcaagttttatgggagatgccaatatcttcccggcgactttggctactgattatgttgagattttccaatatcgcctgccacgaccagccaacttcaccaccaaccggcaatcggtaacggtaggcgtcagaccggaagctatcaccctgagccgtaatggaaatattagccaacgctgtaccatcagccatgtggcttacatggggccacaatatgaagtcacagtcgattggcaaggacaaactctgttgttacagattaacgccacccaattgcaacccgatgttggcgataattactatctggaaattcatccgtttggaatgtttattttgaccgagaaaaatagcggttaatttgattgcaaaagattctgacttttaaatcaagaggctaggccgccaaatggcggcctgagaaagatgatttggcaggttaaaaatacgttgtcgcagaacttctgaagtataatgataaaaaaatgctcgaaccaagacttttagtatgaggtgaaagtgggcactaaattgaacgaaatgcttggctttgccaaagaattggaagaggtaggtatttctaacggtgatttaaccaaaaaacttgaagctagaattcaggttagcaatttaagtactgcactgcttccaaaaaaacagtcaaccagtaagcaagatgtagaacttgccaaaaaatgctttaacgcactgatacaggagcggaaatcatgaaaatgcagacttttgaaagcgtatgggacgcgatcagtgatacaccagagcaggccgaaaacatgaagatccgtgctcaactaataaatattctcaatgcatggatagcaaaacgggaatttacccaagctgaagccgccaaagtactggggattacccaaccccatgtttcagagcttgctagggggaaaatacaactttttagtgtggataaactgattgcgatgatggctcatgcaggtgtgtatatccggcatatcgagataagcgagccggaagtcactttaaccacgttacccatcgtttaactctctcaaaagtgaaatccagtgcttagcgcactgaatttcacttttacttaaaagcccctgatttcattaccgctatacaatttgtaaggttttataccctcttttttacactcatcaaaaaagagagccagagatttagcgccctcttccttcaactcaccaatgttataagcgtaaaagtcagcaccaccatttaacccgacaaattcaccacgaaacatctcgatttctggatcaaaagtgataacagccacatggccgtcaatttttaacgtattgttcatcatggcctaattcccgactaaaataacaagaacctgttaaacaatataaataaatttatcaggttcctgattcaatacaaaaacaacaataaataaatgtattatttaagtagttctcttacctgaccagcaaatgcctcaccgccatccttcgcggtataacgtacatgcaaaataatatctgacaaattatccagaatatctcgctgtatattgtctgttgccgctgatgggaaagtgagtttccagtcagaaaccgcccccgttccttcaaaaggtaaatagcgatcatcaccaaaattaagattaaatgtaccgctatcattaatccctgatgaaagtgcgatttgttggctcgctctcaaattcgtgacaatttgtttattatcgccctctttatttgaaagtaaatatttcacaccattaatatccggcgttttcaatgtataacatttcgtttgagttaaagtcgctttaatatcctgataaggacccattaatgtcggcagcgtgaccgatacagacgtgatctggcgtaaataatgcccggcataatcttgatcaaataatttctcgttcagtataaatgtaactccctcaccggttttaagctcagattgaatatcgtcccattttttcgtaccagataatagattttttaacgagatcgttttagttaactctaaacgacgttcattacgattcaaataagccgattccattttcagtagattcagtttaatcttttctcctaccaataaaccattatggttatcgtcccaactattttgcacaataaattgtgtggcaaaatcccccatttcatattgccagcatgcttgtgcatttaaacatagcgaaagcactgcatcgtaagcctgacgatataatgacatcatctgatcattcagccattgataaagcgaagatttcgttaccctggtcacagtaaaaaactgatacatatcctgctctttttgcagttgagcctgagattgttgtaatgttgtattcgcggcggagatttgtgcctcttgctgttcaatctgttttttcaacatttccagctcactttccgcctgtttatattgaatttcccactcttcacgtcgccggttataacccgctttaacactcaacgtatcactcgccatttgcatgattaatgatgcagtacgtgtaatacccgcagtacaaacaagcggcatatgccattgttgtccaccaaatgatgttcccgctatgctaggaatcagcgaagcggcaccggcggcggttaacattccttcctcaacagaagaaataatttttgccgtaccttgtaaattcagagcataggtttcatctgtagaaatattttcatcataaagcgccttataatgatcaatccgttgttgtaatgtctgctgactttttaataatgcctcttttcctttttcagcaattacgacagcatctttctgcaatgaaatggcgaaaatagctaactctttcaaatgtaattgattcaactcttcctgttccgcacaatctttacgttcttgcgtacttaaaagtaaatcaccaaaatgacttaatgtatctaccgcatgataaacactgggtaataatgcccggaaacgataaggcggtatattcaaaataccggtactgcctgctgccaataacgatccaccgtttgccagtaaagcaagcaaattttttggatcgaccggtgttgcatataatggtagcgacaaaggtttaccatctaaagttaaattatggcgcaaattataaaatctgctagataaaatatcccaataccacagtaaatcattgttcaaagggactctgaatattgcattatcaaccaccgtataagcactgactttagtggctggaagatcaattaatatatcaagatcaatattactctcaaattcgcgtaatttattattctttgaagaggtgacatctgccaactcaagcggtagccaatgactaactaaatcaaaatcgggtctttggccaagtaattgctgtgcttgaaggtagcgtaatttagcattattaagtccgtcattggtcagaaagcgataaaaactatcaccaaaatcaattaagttctgtacatacatttgaaatatggctttcttataatgtaccggatcggcataagctatcgcatctggatcttgtaatctttttaattgtactgagttatcttgagaaacctctaacaggctgcaattccaatagcttgggctaccattagccttattttttactcctgggttgaaaatatagtgcaaccagttttgggcatcctgatattgttgtgaagcattgagttgatacgcaactaaataaggaacatggaagaaaagctcccagaaataaatactatttgccccgttaagcgcagaatcattattttcaccaccccccggaataagcggctccttaatattttgcgcctcccaactcaatacatcagcaatagaattgttagcccgtgaaataagctccttgccaaatagggtatttaatctgatagatcgatatttaaattgtaattcagtaatatccagatactgtgcttgcgtttttttattataggtcaacagcaggttaggataggaagttttacttagtttaacttcataatggttataacctaagtccgcatcttcgccctctttcttataacctaattttaaaaatacactcgaatccttaccatttattttatcgagatcaagttctacagtagaaataatactctttccattgagtaattggcgttctgaatataacaggctatcgctccccccgttagtatgccataaacagaaatcggcctccctagaacctgaatgatcaatatctatttttggcgttccctctccagaagcaacaagcttaccacccgatttattaagttcggaactaaatactttagcttcttgtaatccagacagaggcacttccatttctttagtaaaatgataaacattaccttgtttttgtccccattcagaaaaattaacattcaactcaggataaccactctgactagaattaaacataatataaaaatagtcacctgatgcataactattatcattgatagtcaccgcgacagaaactgttatttttccattgttttctttagcaccatccgcgagtgaaatattaacctttcctgcttcactcgatttacttttaagattaatatcacatgctacagatctaataatctctttcccaatcgacaaactattattaccactgagacgcagttttccactacccatttcagcaaatagtgtcattttctttgtcgcaagcccagggtaacttcctgactccagataaacaggcttatcaactaatttatatgcatcgccaaaataggctgacaacatatttgattgtgtcagatcttgcgtaggattagatttaatctgttgatagatatagagatctaatgacttttcacccaccagaggcacaggaacttcgttaaatagtaaattacaggagtacggataattcttttctcccgatgtattattttctgtttttactggcttacaaatagcagaaataactaatacaggctcagctcgcaaatccattaatgcaatgagttcaaaactatcattaattttactcttatcacccgtaaaagtccgtaatttatttggaagactccattcaccattaaattttcgatatatcaaattaatactataataattttcttctttactattatctgcttcatgtgccaaccaaacgatatgaagacgaccattaataacgactgggcggatcttaatcacttccccagtagcaggaataccaattttttcccactctttccaagccgtaggattaatgacatcttgcacatttcgattagccatattcagcgatcgccaataatattgacctggcgtaatattcatcttaccaataaaataatattcagcctgagcgggagctaattctttagtcgcattaatatagccactcatcagctctaaattacttatttcttcaaatttattcaaataattcaatatgacttcctgaacaacctcatcactcaatttacctttatttaaattatcctccaactctttaaaatcacttgttttaccatggcgtaatatagggctaatataattctctggataattagataactgttgaaaaccagcccaaatattatattggcttaaaacattattccatgtttttactttatcttcatattgataatcataccctggttccatgttaagcataatgccattaatatattgctgaacactggaaatcgcttgtgcaacgacactggtattaacctgactagatacctgattatcaataagtaaatattgatacaaatcatccggcgtttttaaatcaggtacattatctgtttttgaaatatgccccaagtaataaccaaccaatccatcacgaacactctcagctaattttttagcaacaatatttttcatatcctgaacctctattaaaatttttttattccactatgacaattacttttacagagttgctaccatcgctataccgacctgcttataatcctgataagaggaatgagcattgatatttatcgttgctaataatgaatgcatggaaagtgccatttcctcagaccaaaatttaagtctcatcatgatatctatttcagccaatgtttttgctgtattatcttccttgccaataatatgtgaattagctgatagcacttcatcacgctgccatgacaatagttcagttaatattttcaccatattagttttatcgttactttgattattcgtattaactaactccaaataacgcaatattttatcttccgcgttatctaaagaagcaactaattttatccaatctcggtagcgactgaaataataaataaccgacaaagaaagttgcgtgttctggcagccaaaccattcaggatgttcagaaaaatgatgcaacatcacagtactcagtcggaaagtcttaatcactgaaatatatcgcgataaatcatacatcagtatcaaataatcctgactgatcatctctggctgtaaatttttcttatcaaacagttcaaatgacttcaataaaaaatcataactacttgagccgatccagtttagaataaataaaggaaacggttgtgatagctgaaatgcatttgccaacatactggccgatattgcattttgtgcagattgagcttgattaataattgcagcccattgctcagtaatagatactttgattttatcatcaagtaatatactttttatcgttttattaatttcatcaataatattaacattatgcttaactaaaccatatttttgatgagatactgcatttaaaacagtttgacgtggagttaaccaatcaatcaaattatcattatcgtctaatgctggtaagatatttgacgataaactttccagagttaaaatttccgaattacgatgcaatcccacttgattaataaaggccacctgcgccgcatttcctgtcataataacttcattagccggtaataagaataattgcagagtaccaacagataatttatttattctcaaccattctatggtttgctccattgcaatcataatatccaaaatatctgtttgcctattatttcctgattgcgataaataaggcatacccgtgacctgctttaatactttatttccaccgattaatgttaaaataaccacaccttcctgtggtgttaaccctaaaattctcgacaattgcacaatacgataaaacgcagaaacaacagaaagtgaacatgttaaactctttttacccatcgattcagcaactaatggtgctaataaagaaaaatctttttctttaattttcaatccagcacataacttattaatgatattatcatcctgttttttctctgaataaaactcacgatcatcaatcaccaatggtgcatcaaatagcgaagataaattgaatatctgatcaaagaaaggaatatctttacccatcgaaaaaggagtaatttgatatatcaacgcggcaaaatcatcaggtgaaatatgatattttttgctccaatgatggaaaatacctagcatacgtaaggtattctcattcatctgtaattgcttatttgcatccccttctgcccgcatcgttgccgtcaccaataaatcaattttatctaccggcaatttaatccatttccacaaccgtatcatgcgatttagcctatcaaagcgttcatgattcacacctgataatttatttaccgcttgtggtaaattatcatttgagacaaactcacgatacaaatgtaggaaatcactctcttttgccttcggcccattaataaaaacggcaccataatgataaggagccgcaggtagacctaaattaagcacattttgagataatctcacattattttgctctaatgtcccccctttattggtagatatccctttcacacataataattgctcaacctctgcgacagaaagagccgtttgtgcagtaaaaatcgataacaattcaagtaagcctgcactattaacaccgtaattatcccgatagaattgtttattagatggttttaacggctcattgattattttttgttgggaaatacctagctgatttgctaaaggtgtgacaaattctccattagcagtattcagattggatttaagaaaataaggataactcttatctgtctgttgcatcattttcaaacaaaaaagttttctattatcaaatgttagattaatttggttttgtgcataatcataaggaagttgaaatggataacgtacattagccaaaagatcataactggataaatttgtctttccttgttgttttaacatagcttccaaacgttgacttagcatagtattaaccaaggacagtgctgaaatctcctggttaatactcacttcatccagcattaaatgcgctaaatcagcgcggcgctcatctattttaatggcctcagcatccgcattggattcaatatccatcgctaatttataaatctctgctaaataagcaaccggtgaattattcgcttccggtgcgccatttggacaatattgctgccagttatcctgaaataaagattgatattgaggaacttcttttaatgaaagagaagaataacttctggcatatgtattatgaacgtaacgctggcggagaaatttacggtccacttgacgactggtatatgtattatgaatataatgctgctggcgaaatttatgggatatttgtatagcatagctgtttgctgtatcataaatatctgctacctgatgatttgaattatacttctctaaaaatagatgacggggtgttcttataatatcaaaaatagatttataacctgattcaattatcttatcggtgaagttatatttatcacctaatctctttaacaacgggctgatatcattagtcataggatcgcctttatttatcggaaatatacccgtcatctttcaagttgcttctttgttggctgcactcactcaccccagtcacatagttatctatgctcccggggattcgctcctttgccgccgcgatgcatcttgaaatccatagggtatatacaggatgaatatttttttataaaaaaaacaataaattagataacagagatgcaataaataataagaaatttattgcatcatctggcggttattaaaagtcgttaacgattagctgattttcggctcaagtgtaatcaaagcatatcccgcacgattgggtttatttttatgtgtcactctgagtaaaacaatttctgaacaagtaatatcacttggtgcagtataagttgcagtatacttttcgatgtcattaccaaactcatcttttgtgacttctggttcacctaccttaatatttcctctttctggcataagactccattcacttggagaagtcaaatcattaccaacagaagagaatttcattacggcatcgggtgttaataactcttgattatagctaggattaatcgtgaactcagctttcgtgtttttactgataagcaggatattaactttatctaaatcgccattatcagcaacagccgtcaccgtaaccatattatatccagccgggaaagcggctggaggcgtatatttgccattcgcatcaacaacaccatagccagtacccgtttccacacgccaattcacttttttatcgccataaacagtaaaattggcattcttattaacatcattttcattgataacaacaaaagaaggactaatcgatactgaggaaggcaccaaaattacaaccgctgaagctttagcgtttgtatttgggtctgtcgcagtaattgtcacaatttgattattcccttttatcttagtcggtgccatgtaatctcctgtattcgcattaatactccccaattctgctggagtaatagaccaatttaccgttgccttggtgttggttgtaaatttatgcttagctttcaatggtatagttagttgaagatcattaattctaaatgcagttgatgttggggaaatatcaccaaatagcaccatatccccaggcacatatactttatcaaattcaagataattgctttcaggaaaaagaagatgattaactgcaaataggctaatgctatctaatttaatctttgcaacgttggataaattattttcaacaatatctttaacaacttctgctgttttattaacaaacttttctttaggataaaagtgtattccccaaacaggttcatcttgtttgtcatatctggtgctcattctattatttaattttaattcaatctcatcattagattttacatgaggcgtaatatctattgaaccatcaatataaaaatcaattttagagtcgttccaaccaccacttattgctgaatcgtaaaaaacaccaaatgtttggataaaatgataagagtgaccattattatcctccccagaaaagataattttttccttctcaggcttaatatacatcccagaataaggaatttttaccttctccagccaaatattagtttcacctttagacaatcctgtccatactttataccctcctccttcatattgtacaggttcatcgctctcagcatacccatttgttatcttcaaatagctagctgaatcatccgcctgactatctaacttaactaattctaaatttacacccgttgggctaggtaataaacgctcatattgcggcttaagaatattctcaaaaagtgtcttattactgataattagcatcgcagaacgattatctggtatcaaataaggaaaattacttgagctagttggtaatactccaccgttaggattatagtttgttgcaataaataacaacactgccccatgaccataattatcagaaccatataaattagcaccgggtgccggttgcgttctgattttaaacatttgtggaaccagtccaaccatattatccagcttcaaaatacctaactcataagtgacatcattatctttgagccaattacggaaaaactccttaacttctgctggcgcatcgttgataacattgactacccccaaaattccttttttaaactccacgacaactttcccattattatcaacagaacctgtcgccgcaatcaagtctacggttattgtcatatggtaattattattcggggtaattctttgataattctttactctaccatcatcataaagttctattatcgtgccagaaataaaatttaattttaccgttgcctgagaaccttcaattgatgaattttcaaaggaaattaacggtactcccaatatcaagttgtcaaattttatctttttattttcgctttcccagaaaataggtgaaaaatgtgcaccttcacttacttttcttacatattgctgttcaaacagcatatttattttagttctatcataggcagcaataatatcccatccaagagtctttgttttaccgttaaaatcatcaataatgctatcttccgtggccatataatcacctattttagacgtcataaaagatctgttattagaggaagcgtattagataatagcttccgccatcatattaattcaataatatacccataagtcgaatgtaaaatatatattattcaatttaccctaatagattaacaatcaattaggatatatatgataagcataacatatattaatgaaaatataataccgtgaaacattaacaaaaaacatgtaacagctaatatataatattagccatataattaatattcaaatacaaaaagcaataattacacggtcaaacatagattataagttctgcgaatatcaagagccccttctgcgtgacttattacgtctaaggttgttttgccagcaacgagcagtaacgttcgatatccacattaccgccactgacaataatccctaccttttggcctcgcaatgactcacacattttgcgggcagcggcaaaactcaagcagccggtcggttcgacaatcatcttcattctttctgcataaaatcgcattgcatccaccaattcttcatcagaaacagtgaaaatatcatcaacattttttcgaataatatcgaaagtatattgcccaagatgttgagtttgtgcgccatcagcaatagttttaggcgtatcgatgtgaataattttgccctgacgaaatgattgctgagcgtcattaccggtttccggttctacaccataaattttacattcaggagagaaatggcgagctgcaagcgcactgcctgaaagcagccctcctccaccgagacagacaaacaacgcattcagttcaccgacctcttcaaacaactcttttgccgcagttccctgtccggcaataatatgcggatgatcatagggaggaattaaggtcaatccctgcttttctgataattcacggctaatttgttcacgatcgtccgtataacgatcatagaaaacaattttgccaccataaccttcggtcgcggcgaccttagccactggcgcatcgaacggcatgatgattgtcgccgaaatattcagtatacgagccgccaatgaaattgcctgagcatgattacccgatgaataagtgacaaccccattgcggcgctgttcatcattaaattgtgataacgcattaaaagcaccacgaaatttaaaggctcccattcgctgataattttcacatttgaaaaataacctggctcctgtcatttcattagcagtgcgggaagtcaggactggcgtacggtaagcataagcttctattcgccgggcggcggcaatgacatcatcataaacagaaatatttttcataggaataaccgtaagttatataaaatattagacaaaatatccacaccagaaaaattcgtcaatagtaaaggttgtgactaaattttgacttaccacaatacctataaataatacctataaataatacctataaataatgcctataaacaatgcctataaacaatacctatagttcagaatctctgtgcgcttgattaattatcgcttttgccatccatttagtgatctcaataatttccgcattatccatctgccagatatctttcatcaccagaaagacctcggagccataaattagggaaaaagaccgaatgacattttccaaaatatccggcggaaaatgcccttttaatggttcaacaaccattgccaggatatctttacgatgcccacgtaccaatttcttttcctgcttaccctcagataaacatccctgagcccattgttgcaaggaaactaacagagcagctcgcaatgcaccttcgtattgaaacattcggggataagcaaagtccaacaactccgtaatccgctcctcagtcttttcactagcaggcttccaagtgaggatcggcccaaggctggcaccaacaatcgcatcaattaaatcactttgtgtcggaaaatagcggtatgctgttgctctggaaacaccagcatgcattgccaattcagaaaccgaaggtatcgctctctgttcaaaaagcgccaatgccgcattgattagcaatgtataagtttttttccgagtaccagtaaaatgagttttcgtcttcgaatctatcattgccataactcttcacaataaaaatcgctatatacccgttatctttcaagttgcttctttgttggctgcactccctcaccccggtcacatcgttctctatgctcccggggatttgctcccttgccgtcgcgatccatcttgaaatccatagggtatattaacacttatggttaaaatattttttcgctatcatcactctactcaaccatctacaaaacgaccaaattgattcattttatttatcaataaaatgagatgacagtctcaatttggtaatacaacagtgatacttgagtctcatcttgactataatctgtccatgaatgagtagtcagcaccagggaagtattcataattataatgaaaaaaagccaaggctatgtttatatcgctactatttttgataccaagcgcacagaaattttctacgtcagggatctgatcaaaaaagcgggccttgccgttcgaactgtggatttgactactcaatctgactcgccgcaaagaggtgcggatattaccgcccaaacagtagcagagcatcacccgcaaggcaaagaagctgttttctgtggtgatcaggggcaagccatttccgcaatgtcagtcgccttcaatctctttttatcaaaacaacctgatgttttagccattctaggtctgggaggttcctgcggtacagcactgattacaccggcaatgcaatctttaccggtaggtataccaaaacttatggtttctactatggcttccggcgatgtttctggctatgtaggtgttagcgacatctctatgttgtattcagtcacggatgtctctggtcttaaccgtatctctcgccaggtattaaaaaatgcggccaaccaaattgcaggggcagtctattttcacgaagagaacactattgaagataaaccggctatcggcctgacaatgtttggcgtgacgacaccttgtatacaattattaaccagagagttggaacaacagtatgattgtctggttttccacgcaaccggcagcggcggtaagacaatggaaaaactcgccgaaagccgtttgctttacagtctactggatatcacaaccactgaagtctgcgactatctgtttggtggtgttcttgcctgtgatgctgaccgtctgggggcaatagcccgcacgcaaataccttatattggctcttgcggagcgttggatatggtgaatttcggtcatctaaattctatcccggaacgctacaaataccgacaattttaccgccacaattcgcaagtaacattaatgcgcactatacccgaagaaaaccgccaaatgggaatttggatcgctgaaaaactcaatcaatgcgaaggaaaagtaaaatttattattccagaaggtggtttttctgctctggatattaaagatgggccattctggaatcctgatgctaatcaatcatttatcaatgcttttgaagcaacattgatagaaacggaaaacagacaactgattaaaagccctcatcatataaattcacctgatttttgccaacaagtgattaaagaataccggcaaatgatggcttagcgccggcggtaataccgttgcaaaaacaacactgacactgaaagattatatacaactaattaatgactaggcaaaaagttgccaaaagagggcattctaatgctattgttctatcagagatgaatttacgacatgtctgtcaggacgttgcactaaaagaaattaaagcagttaactattcgtgttctaaagggaagccataagaacttcctgttaataaccttgctataagatgttaggagttaacaaactaaattaacacataaaaataccggctttgttctctccctttcggagcttatttccgtcaacaccaggctcctgcggcccccaccgcaggagtttttttatgaataaacgggcagcaggttaaaatttgacaagatatgggccgcagcatttagtacgccaaatagcaaaatcaagccgatcatcacattacctccccaaactcgatacatagggctaccaaatcgtttacgggatgctctggcaagtaatgcgggaacaatagccgcccaaactgttgcagcaaggccagcaaaacctatcgcatgaataaaaccattcggataaatcattccaccaaccattggcggaagaaacgtcactaatgccgttttaaagcgccccagcttggtgtcatcaaatttaagcagatcagccaggtaatcgaacaacccaagcgtgacaccaaggaatgagctggcaaccgcaaagttagaaaaaagagtcaataataaacccagagcagaactgttcaatcctccacttaatgattgaaccaaaacatcaatattgcccccctttgcgatgatttcgacaaaatcaggccgggaaatatttcccattgttccaatcaaccagatcaaataaagcaccaaggccattgatgtcccaataaacaggcatctctttattttctctggttcttttccataatatttcatcaggctaggaacattaccatgatatccaaaggaggccagacagaaaggtaaagtcattaatacataaggccagtaagttggattaacttcagttgtattaaacaataccgctggtttaacgttataaaccaaaccgccgaacgtcataaagaaagttaatatcttagcaccaagaataatcgacgtcatccggctaaccgttttagtacttaaccagacaataaatgcaaccacaagagcaaataaaaaaccagcaaacccaggtgaaaaatctatcgatacttctcgcatagcatgttgaataatcgatccgctcgcggaaatataagcgtaagtcagtatatataaaacaaaagcaagggtaataccattaatgatattccaaccattgcccaacagatcttttgttatagtactgaaacttgagccaattcgataattaagattggcttccaatatcattaatcctgaatgcaacatgcaaaaccaggtaaaaatcaaagtggcaattgaccagtaaaaccatgcccctgacatgacaactggtaaagaaaacatgcccgcaccaataaccgttccaccaatgatcatggcaccgccaaataaagatggagacgatttttttatcggcaaagtagccatatgcgttaccctagcgtggctttatacccgttatcttgaaatctatagggtatatatagtaagcagtaaaattggggatgctcttaaacaagggagcatcccgatctttattatttaattggttttaatcttgcaacgaaatgacgtaatacggatggttcataagtaaacgttaatcctttaatctgaggaattctctccttcaaggaaataaaggcttctacaacataatccatatgatcattagtataaacgcgacgaggaatagttaatcgcaaaagttccatcggtgatggtttctgttttccggtttttggatcacgacctaataacaaagaaccaatttccacacttcttattcccgcctccagatataattcattattcaatgcatgagcggggaattgttcccctggaatatgcggtaataataatttagcatcaacaaatacagcatgaccaccggttggatattgaataggaatacctgcatctcttaatctattacctaaataagccacctgattaatacgatatgccagataaccctcattcatcccctcttcaagaccaattgccaatgcttccatatcgcgcccggcaagaccgccataagtcacaaacccttccattggcacacagcgggtacgcacttcattaaagagatcttcatcatcacggaaacaacaaagaccaccaatattgaccaagggatcttttttagctgacatggttaacatatcaccatattgatacatctccttgacgatctgcttaacggatttattttcataacccttttctctttgcttaataaaccaagcattttcacagaaacgggctgaatcaatcaccacaggaatatcatgttgctttgcaatctcatacacggctttcatattagcgagagagataggctgaccaccggaactattacaggtaaccgttgtgataatcgcgacaacattatcagcgccatgttctgctatcgttttttccaattcatcaatatcaaaatcgcctttccaatcataataggtggttgtatcaaaggcttttgacgtaacaacattaatcgctttcgcgccatttaattcaacatgagccgctgtcgtatcaaaatggaaattagaaataaagaccggatgcgttgcaccaccttgcgcttttttacgagcaattaatgtcggaaataaaatctgttctgctccacgcccttgatgggttggaatagtatattggtagccaattaattcattgactttatcacatagatgataatagttacgggaacctgcataagcttcatcccccatcattatccccgcccactggcgatcactcattgctccagtgccagaatctgtcagcaaatcaatataaaccgcgtcactgggtaataagaatggattatatccggcttcttctaatgctttttcacgttcggcacgagtagtcatgcgaatattttctaccattttaatacggaaaggttctggaatacgtttcatatatatttttatccaataattggctatactacataattcagacaaatttccaaaaaccgacagaaatacgccaaaataaatgtagtgattacaagatttaattttaaatataaccagaacagttaattagggaaaaaatgagaaatacggtgatcgacattaaaccatgcctgcatattacaagaatagataaaataataacgtaaaaatatagaaatcataaaattaacttattccctgattaaaatcagccattaagatatagataatatttaaattatccgtgaccaattccacaaaaatagaaaacatcagaaatataattttatatatagattcaatttaatgaatcagataaatcaacaagaaaaacagataataaattgattttaataaatataacaatacaattaaccatatcaattaaatagattactaacacagaaaaccaccccataagggattaaaagaacaaattaaataacataaaaattaatagaattatttacccgatttttacaggaataaaaaatagctttataaaaaaccgccctttattaaagggcggaaaataggaaaaaaagaggcagaattccgcataacgcgataatatcacacaataatattacacaataattatgctaactgaatatcaatagaattccattttcggttagctatttttttcagttccaatagacattggataattagaagctaaatgattaggtgcttgagaaccgataatacatgttgcagtatgagatgaaaagataacgcattttaccgcacatataggaaagtgcgggtacaatatacaagcatgggtagatgtagaaaaagcagaaaagaaagtcaacgttaaaaaggccaaaagtaactggtgttgtagtctatttatcatcatatcacctcgctgaatggtatattttcatttccttatattcgactcctttaaattaattatagagcaaaatttaaccacaaaaatttttttatcactccgttgataaatcgtttaagttatcataaaaagctgaatgatcagatttggaaaatcccataatccaacaaaattattcagcaatataaaatcataaataaaatttaaataaaattacctaatgattcattatacccatggatttcaagatgcatagcggcggcaagggcgcgaatccccgggagcatagcgaactatgtgactggggtgagagagtgcagccaacaaagaggcaacttgaaagatgacgagtatatacctcatctctattaacggataaataaaccatgtacaatatctgaatattttctgagtatgcggcatctcaagaaataattcatttacctttttcaataagtaggtttttcaaatgcatcaaactgatgttactgagcgctcgctcttttcgttaagctggccgatttttattgatattcttctccatctggccactttattaattaatacttatatggtgagccatgtttctacttcttatctggctgctatggctgtaggtaatcaggtatttgatctgtttatcactatcttcaactttatcagtgttggttgcagtgtcgttattgctcaatatattggtgcaggcaaacgggataaagccagccaggcgatccatatttctattgcattcaacttcttgcttgggtttagctgtgcgctgattactatcttcttcggctataagatcttgtctatcatgaatatgccggaacatctgatggaagatggttttaactatctacacattctgggtatctgtcttatccccgaagctatttcgattattctggctgcttgtttgcgggtttatgggaaatcaaaaccggcaatgtatgttactttgattgctaacttgctgacagtgataggtaatatgatcgtcctgtatggtttcttcggattacctaaatatggtctggaaggcgtcgcctggtctacagtctttggccggattgttgccgtgatcctattattctgtctgctcagttatggcctgcggatcaaatttacgctggcgggtttcctacgctggtcacagggtatgttgggcaaaatcttatatatcggtttacccgctgcgggtgaaaacgtcgtgtggatactgcaatatatggcggccatagcattcattggactgatgggtgaaatttcactggcagcacaaacactctatttccagctatcactgtttgtgatgttatttggcattgccaccagcattggtaatgaaattatggttggtcatctggtcggcgctaagcggtttgaagatgcttatattcgtggcattaatagtctgaaaatcggctgtatcgtcactattggcgtggtcactgctttctggctgttgagaatgccgattctgcattttctgacgcaagatgaagctattatcaaactgttgttgccgctattcttgctatccgtttttatggaaccaatccgtaccgcgaatatcattatggtgaacgcattacgcgcttccggtgatgcgcgttttccactatatgcggccatattctttatgtggtgtattgctattccagtgggatattttttggggatcaaaatggaaatgggcattttaggtatctggatcggtttcttctgtgatgaatggctgcgtgggctcactaacatctggcgttggaaatctaaaaaatggcaaactaagcgactcgatatttgaatgattaaaatatccccgttatctttcaaattgcctctttgttagctgcacgcactcaccccggtcacatagttatctatgctcccggggattcgcgcccttgccgccgcgatccatcttgaaatccattgggtatatacaaccatatagaatcacaaatgaaattatattataaatgattgttatcaacaataaactattttataaaaatcacctatgcaacatgtttatatacaatatataaaatagaaaataattccacgaaatgaatagaatgtaattgcatattaatcatcggttactattttaaattctcggtaattatatttcccttataattagaattaaccactttaataaatttaattattaatgttatttattttagataaattagaatatattaaaatcattacctaaaaaaacagatttatattattttcaataattaaaatattagataaacaacacgaaactccccctataaacattagcataattcatttcctatatatttaatccgaatctctatttaccttcccctaaattaacccctcttaagtaaatataagattaattagctgaacaaagttatccaaattgttatatttagctaataaccttattgagaaatttttcctttcctctattatgagtcgatgaacggttattaagctcattaaattaaccctcatattcctgggcatatttattgcattacaacttgtaatttcattaatcacaaaacgttattaatttatttatataccttatagatttcaagatgcgtcgcgacggcaagggcgcgaatccccgggagcataggtaactatgtgaccggggtgagtgagtgcagccaacaaagaggcaacttgaaagacgacgggtataattaattaggatgcatttaatgataagtaaggaaacattcgagatatttccctcggtggatattgttgacggaatagcaatgacatcgaattccgcaattcgattaacccgaggtgaaagctcaacattacggagacctttaggtaccccggcagaagtagcactagcctggcaaaatgccggggcaaaatggattcatgttgttgatcttgatgctgcgtcaggacgtggctcaaacagccatcttattgctgatgtcttggctgcggtcgatattaacgtacaagtctgtggcggaatcagagatgaaaccatcttgcgcaaagtattagccactggatgccagcgagttaatttggggaccgcagcattagaaaatccagattggtgtgcccaagccattgcagaatatggcgataagatcgccattgctctggatgtaaaaagcacatcggaaggttaccaattggcaacgcatggatggaatgtcagcaaaggcaatctctgggatctccttgagcgcctagacaaacagggttgtcaacgctatgtcgtcaccgatgttgagcggggaggcatgatgagttcgccaaacttcacgctattacaggaagtctgtgcgaaaacgtcatcacccgtgattgccggcggcggcgtatcgagcctggatgatctccgcgctttagccgatttgtctactatcggtgtcgagggtgccattcttggtcaagcgctacatattggtaaggttcctctcgaagatgcccttgctgcaacacaatcaccgagacgttgaatatgtctgaatctttatctcctacattggatcttcgctctattggtttactgggcgaattgcgcggcgtacctgaaacagactatttaactaaagaagtgatggcgctgcctggtttactcacggagaagccagcattcgtcggatcccgcggtgcagcctattacgaacaaaaatcttgtcacgaactactgatgacggcgaaatattacacagaatacatcgctcaacttgagtgtagcgataagctgtgtactgccccatcaaaatacatattggccgatcatagcttggcaaaattgctcagaattgttgatagcttattaagttctccgcagacggttaacgaagatattgtgtcatttatcgatgggatcaaagagtgtgcaaaagtcgtcagctcaacgctgatgggcacaccatttactttttcaccctcgccgatccatgacttgaaattgccgttggctacggaacacaaaatgcccagaccatttattgaaggggataatcatctgttaactttggccgcagcccaaattgacaaatgccccaactcctctgttgttggcatcatgttaggaggatcagcggcagcggcagtcacagccgcagcatgggatagtgagctcaatttagtgaaagtctcacgttacgatgatacgtctcacaaaagcagccatctctgggggcgcaaaattccatcagggagaaccgtgacaattattgatgataattgcggaacaggcgacaccttacgtcaggcaatcgatctggtcatggcccaaaccggacaacgtccaaaggcccgtgccgtcgaactacattgggaaaaattattacgtactcgcgtttatgggcatgctgatcgtgtattcaaccctgaaactttagatgtcttgacgccttggtgtttcaggcatcatcaggtcctgaatcgtttaattgatcagcctttcgctgatgataaatatgttcatacaactacggcggattgggttgcctattcatacagtttattgtctgtccttcatgacaccctgacaaactcaacatgggcagccaaattattgcgttttttattaaatctaaaagcacaaacaccgctgaattatgaacaaccaatcgatgcatttaaggccctggcacatcaatgtcctgaatgttcagctcgcaaaaactcgtttgaaaaaggagttaattgattatgacaacagcacatattatttgggattggaatggcacattacttaatgatgtcaatgtttcattgagtgcaaccaatttcgcattggcagaaatgggtattgatccactaacgctggaacaatatcgcgaatattattgtgttccagtacaaactttctataaacaagtgattggccgtgaaccctcatcttctgaatggtcagtgatcggaaaaatatttaattttcactatcggccgggtattcagaaagccagtttaacggaaggtgtgagccagctcctcgcttcccgctatgaaacaggtgcaacccaatcattatgttcactgatggagcataatgaattagtccctatgcttgataatcatggcattggcaaattctttacccaaatagatggtagaaatacgccattattgaccaccggcaaatcagagcagttagctaaccatctcaaaaaactcaatgttgctcctgagcaaagtgtggttattggagacgctactgatgacgcaattgccgcattagcggcaggaactcatgccattctttataccggaggaacccacagtcgtgtcagtcttgaaactgccggtgttcccattgttgatacattaagtgaagcgttattaatagctgactcgctaatccagaaataatcataaatgattattcaaaataatcggataagaaaagggataatttataacgatgtatgaatagatagttagcatattagttttaaaagagcagattattcatcttaaaaatattatccaaactggattatttaactattatttagagtaaatcaataaataattaaggaacagattcatgttaacggctgtagttggactccaatttggagatgaaggtaagggaaaatttgttgactatttatctggcaatatcaataacattgctcgatttaatggcggcgctaatgcaggtcattgtgtgcaacatggtaatctaagaggctcattttctcaattacccgcatcactcaacaaaaagaacttatatatctgccaaggtgctttaatcagtcttcccattctggttaaagagatcgactttataaaaaaagaagatattgattctcatatatttatcgatccgcgatgccatattgtcttaccattacacgccgagttaaatcgagcgtcagaaaaatataaaggtaaacagaagatcggctcagtgggtgtcggtgtcggagcctgtgttgaagacaaagccaaccgtcatggcattcggcttattgatacctttgataaagagaaattaaggagtaaattagaatttctttggagtattagggaaaagcagattaaccatgtttttaatgcacaagcttcattagattttgaagagatgttagaaacaacacatcaatatggcaagaggatagaaccctatttcacgttcactaatgaaattatcggtgatttacttaattcgggagaagatgttttacttgagacatcacaagccactttcttagataatagttttggtacttatccttataccgtggcatatcagacactagtgcaaacctgctttgccatgataggtataccggcacagaaaatgcatattgtcggtgtaatgaaatcctatatgatccgtgtcggcaacgggccattccccaccgaattatcgacagaacaggctgattatattcgagagcgtggaaacgaatatggcaccgtttcaaaaaggccaaggcgttgtggctggttggacttatccctgattaaacacgcggtgaaacttaatggtgtaatagaactcgcgataacgaatgttgatgttcttgctggtttagatgaaataaaagtcgctgttgcctatgaaattgatgataaactcgtctgttgcgataatgcattattgcagctcgatagagccaaacctatctataaaacatttaaatcctggagcacacttaactcatcctatacagatttaacggagctacctattgagctgattgacttcttatcttttattcaagactatactggtgtcccaattaaatatatttcatatggaccagacaggaatcagacattagtagtgaaataaaagcgtggagaaaataatgattaactatgtaacaggatttatgttttctaaagataaaaaacatgtctcgctaatttcaaaattacaacccagttggcaaaaagggaaactcaatgggattggtggaaaaatagaagcgggagaaagcccccaacaggcaatggcaagggagtttgctgaagaagctggcattgaaacacgtcctgaagagtggcgactatttaccgtattaactcgtcctgatgtttatcaggtaaattttctctatatgtatgatgatcgtgtctattctgtcaattctattgaaaaagagatcgttaatatctatgaagcaaattcattacccgataatgtgatctataatttacgttggctgatccctatggcggccgatgagcatttacgcttcgataaagaaatagaaataacagaaatgcggggttaggggttagatacggtatctaattaacgttttgacgttctaataaacacagaaacacctgcgcttgaaataggtgcttctgtgaaataggtgcttctgtgaaatagaaaacaacatcgtcaccaaaccatttcgataaattccccagcctaagcagatggctcaacgaagttaatatccgaccacacggaaataaccgcgacggccttggcttgcccgccggcaccgtcagtcttcaacagaatcggtaccacagacagttgcgttgaggcggtataactatcgtcccccagctttacatatctcgccgactgccctgcacctcggtgcccggtactgagtgataagggtttattggcaaaatcgaagaacgcgaaggcgacctgatctattgacgaggccagcgcatgcggtttgcccggcacgaagggtccatcgatccggtagagcaggcgtgaattttggaataccgcgtcatcaccagaacaggtgctgcttatcccgatctgtctggccggtgccagtgggtctcccgcctgtttaccggctctttttactgttccccaatccaccgatgagggcgtcaggacaaccgcacaggtggacggctttttaacggatgaaaggatgactgtggtccacaggggtttcagcctcccgttagaacccgatatggcggcgggaatccagccgatcgcgcccactgacagggggctgcctcctgccttcgcattgaaattgccgtcactgtccgggtaaattgcgcctgtcacggtacggacactgacatcaaccaagccgttagcatcgggaacacagggaatgttaacgccggcactccgccctgtcagactggcagagcgatacgtaccggataaaccgtgcgtctggcaagagagtgaagattgcccgatatcaaccataaagtcgccggatcgtcccactcggacgtgactcggtgacgacgaagagattaatgggttcgttccagattccaccgtgtaggccataaactgcgttccagccgggacgcgacaggttgtcgaccagtcaagggggccactggtggtataacccactatctcatcacgtgagtaatcacgtttatctttgttgtttggcaccgtggcataacccgtaacatgacgaaccatctgtaccagttcaatctcgcagtcctgataacgctctgccgcttgaaggggcaaagcagtcaataaaaagagcagtgatatccccaaacctatgagggttggaacggggttctctacatgacagccccacaaacgttcagtgtttaacattcttcttctctccaaatgacccatctgttcaaatcgctgactttaactggcgggataacctcacttttagtggtgcccacatgaagtaacgcttatagacacacggcgtctgcctgcaccagttgcccgggggtatcgggcggtacctgataacgagtagtgcattgttgcgctgccccgtttccccatttgactttcacgcgaccggcgggaggcatgccgctcaaataaactcggccgttatcgcccacaatgccgctgccggcctgattggcattctcttccagcgtcgcggtggcaccaaaaggtaccggtttgccatgatgtatcaacgtcaacagtaactggctgcctgagcgaacctgataattggccagcgtcactgctcccctggtcggataaacattcttgctggtctggtcaatatcgatcccttccgacagggtggacgggtccagattgatggtgtttttgtggtagaccgatccgcccggcagtacggcgtagccacgccagtcggtctgcacattgccgtcaccgaccgtcacccctttcgctccgggtgcacgaaccaatacggcttcatcacccagtgaacgtgatagcgtcatgccgtaagggtggattaggagggcaccggaagccccgtaagtgaaatgatggctattggtactgtcgttgtagcccagattaacgttgccctgactgccctgataactcagagacaaagcccgactgttttgctggccacgattcccccaaccttgctggaggttataattcaggcggttatcccataacatgccactgatgccggtctgctgagtcaggttaccttgcgagtcgcgcgaggccgtatagcggctgtaaactccccgtagcgccgacgatgatccgaagagactaagtgggacctgcatattgaatgacacctgacgattctccgaccagttgcctgccccttccatgcgataaatgttataactcaggttatagctgatccccattagcatcgcgttataacccaaattcagattgttgtcggtacggccattccaataatcgttgcgcgtcccggaggcgtaaagactgccccaacgtcccagcgtttgatgcaaactcaactgccaagtgttttgacgtcggtcaagcgcccacggcacttgatattcattcaggctgtaccccatgctgttaacatcgctgaaactgtaataatgctgagtggaataacgataggcggccagatcaatgttggtgccggtactgatcaaattcttggcatatttcacccgataagcttgaccctgttgccagctattttcctgtcccttaaccccttgcaactgggcacgggcaaacgtcacatccgcagacagtgcgcctaatgcccccagtgacacgcccgagccgaatacacctgactgataattgcccgcggccagccccccgccatacagagtgatattgtgtggcaaaccatagatcaggctgcccagcgcaaataccggggaacggctgccatcagtgaggttgccgccgtgatattgaccggccgtcaactcatatttaatgccaccgggacgctgcatcatcgggacagatgaagaggcgagggtcgagacacgggaactgccatcttcctctttgaccgtgaccgtcaagtcgccagaatccccggtggtgtacaggtcggtaaaacgaaatggtcccggcgctaccgtggtttgatacacggtataaccattctgggataccgtcacctgcgcattggagctcgccacaccggttatctccggggcaaaaccgcgctgactttcaggcaacatagcctcctcagaaaccaatttcatgccacgcaacgggatgctgtcaaaaatatccccaccggtatagatttcaccggccgtaaactcactgcgcagtgattgcacatcacgttgcagataggtattactcacctgccattggatctgcgtagagggggaaaaaccagcgggacctccgttgcgctggcgattgtaactgtaagtttgcgtgctacgcagacgccacggccccagattcaacccattacgaaaagaggcaaacaggttacgggagcgtgatccaccgccagcttcctgaccgtcataacgaccttccgaaccattgacggtgtagttcatcaaaaaggccgggatcccgttatcccacagtgatgggtcaaccatcccggaatggtggggctgcatagctgcttgaggaacactgaggtccagacgtaaacgggcgaaatccaatatcgtgctggcatgtgggatctgtttcgtcagatccgtgatggggctgtcactcgcttttccctggaaagccggtaacccacgaatattaaccccatactcttcgagctgtgcaaccgttaataccggttgcagatgatcatccaccaatctaaattcaatctcgcgattatccaccttatcttggttcatgtagatatccaccagatagcgtcccggtgcaacatagcccgcgttttcatacgccgaaagatcgatatgctcctgctcccccgtcgcccccatcaggaacgccggattaaagtattcccgcgcggaggtgggcaaggttgtcgccgtcagtgagcataacagacagacatatacaggacggagccggaaactgcccggctgaccgggcgaacattggctacccgtcggccgcacagacgaaaataaaatgtttattgtcatagctcatctctgcttctaacttaagcctatgtggttaatcttgaggtcactttgccggtcatcgcccgcagatgaggacaggtcataacggaacatggcgatcctgactatcgccgggaaaacgccaaaccagcgaccccgatcttccagcggtaaacgaatgggtctgaaacgaatgtgtttgaaacgaatgtgtttgaaacaaatgggtttgaaacgaatgggtttgaaacgaatagttttgtatgcctttcgggggcaccattgcctgacgggtacggtcatctgcctgttgtccgccgactttcaggaccgaaaaggtcagaaaatagggtgtggggttttccacccgtaactgcgtcccttgaagggaaaatttcacctgtttagccaccgtggcgttatcccgagcaggtaccccttgagggcgataaaacagtcggatattcatttgtaaggcgacctgcacttgcgaatctttgccggtctggcgctctggtgctcccatgtccggtacagcgacgccggggatagcccgcagcgagaccacaaaggccgattcccgatccgacggtaattgcccgccaagctggcgaatacggaacgaaaattgctcgccagcctcaacccgttttaacggcggcagaacgataaaagggggaacttgcccggtttgggtgtcaaagcgaccggtatcggggtccatcgggctaacaaatccctgtaccagatagttctgtgccgtgtgattaatcatgctgagggtcacgccgcgcgggctatcgttagccacataagataactgcatcggggagaacgataaccccggattctccgccgcctgcacctttaacaggccacctaacagcagggcgaaacagaaagggtaaatcattgatccaccgggtgctcgcccattcccgttactgactctcttcactttccacctctggataaaacaagggcgaatttaacgcgccacgttggcggtaaccactttggcggtaaataggtttgaagccccgccgtaatcgttaatcatcgaccagctcaccgagctttgactcacttgcccaacataggtcacacaatcctgcggcgctatcatggagggatagcggttcagatcgagcgcctgtccatccagcgtgagactgtccagcgacagaaaatacggggtgggattgcacgccttgatgccatcgggttgcgactgaaagcgcaactgtccatacgccgcttccggcaacagaggcaagctatgcggtcgccagaaaaacttaattcgcatccccacgctcatcgatgcctgttcccgaacagactcatccgtcatctgttgagtcgcaggaatagcgttcatctggacatacccgagcgattcccgatccaccggaaagaggggctgattaaaggttggcaaaatacgcaggctgttctgactgttggcttccaacctgaacagcggcggtgtcaccacaaacgccggtgcgattttctcctgatcttccattatccttacctgcaccagccacgcctgaggtgtggtattgaccaccgtcagcgtttgtgcccgttccccttgggtaaaaatcacccgggttttatttaggctgataccggcggctcgacaggattccataccgctcatccctaaccctagccagaacaccaatagcaccaaccggtaccacgcagggcgtacccgacctgtttccacaacgcctcctgaaacctgttacctgaatcacactcagtgatagtcaaattgaaattgaatgtgcgcagtcagttcaccgggagtcggcacagccgtgccggattcatgccgcatatccatcaggaaggtaatttgacggtctttaacggcgttacccgatggtgccaaattcacataatcgccatttttcaggtagatccccaacccgcctcccggcaattgatagcgaaggccaaatcccacatttcccgccaccgtagacgctttatcccgaaataacgtcgggtgctcttctagcgtggtaccggctattttaatcgccggggtacggcctgctctggctgatcccgcacagcctgacaatgccaacgtaatgggtttgctgcccgccgccgcaatatgttgcgtgctataccgcacctcggtgagtggtacggatgaaaacaccacatgggatgtctgcatgtagagctcacaggttggctgctccagcgtcaatgccaacgtcagttctgccgtgtttgggctcgctcccccgggcagggaaacggtacagagcagaccggctagtgttgtctgtctgataagaacccacggtttgcgcattacggtatctccccctgataggtggattctccgccgaagtcattaatcaccgtccagcttactttggctggataacgtcctcctttaagtagtagagggaggtcagagaacggggagaccatgttcactttctgctgcgtcatcacctcctgtccacccacttttagggaggttaaagtgatgtaataaggtgatggattggtgaccatgattcccgcggctgtcggtttgaagcgcagtgaaccaaatccctgctccggcgaaaccgacaatcctgacgggcgatacatcagcttaatcgtgttggctatagcaaactgtattccgccggagacattcctctgggagcgattatcggattcagagcttaacggaatggccttcgccgtaaaccagaacagcgattcccggtcagcaggcagcgacggacccgttttgatgatgcgcacctgattctggctgtctggttccatacgaaacagaggcggcgtcaccagaaatggggcggttttatctcccgtagaagtagaactgactgtcgcctgtatcaaatagaccgcctctttactggtattgctcactgaggcggttgtcgcgcggctatccgctggatagataatgcgggtagtgttgatccccaccccttccgcctgcgcggaagtaaccggccagcctaacagaccggtcactatcattgctgtcatcaatcttttcactgacatcacctgaaatgtctggtttggtattgcgtaagtaagaattggacctccctgtccaattccacaactatgtgtttctaacgtctgacagcgttgaattagtcatacgagactttcacggtcaggtttgctttggagtctgctgcttttaccgccgtcgcaccaatcctagccagccctaccttaagcgtgatggcattatcaccggctactgcggggctatattggggatcttttaggttaattcctgcatttggcggtaaagccttatcatttatcgtaatagcaaccgcatggtcggtgattgcagcattacccgtggtgttaagaagctgaaagtaactactggatgatgctaatgtggtaccggcaaccgtcaatttaacgcttttcgcggaactccacagcgggcatttttccgttttaatcgtgacgaatttttgcgtgttagctacgattgctccatttcctaccgcagtgaaatcagataccaaagcggagagactaacaggctctattgctgcaaacttacacgtctctgcggtcacggaagagcttactgccaaggtaccggcactcacatcctccgctatagcctgcgacatcccccccagacacagtgccgctatcgcacaggtcttcaaaatttgttttttcatttcatcgattccttttatctattcgatactttttgcgtgaaacaacatcacgacaagttaaacaaccagatcgctaacgcggtgcgttttacttgtcatttgagttattttgtttgctgattaacttctgaagtttggttcaaccgtcgataacatatcgatttctgagcgggaaatattgagaggcagtttgttccttttttgaaacaatcaattattagctttcgatatataacctatggatttcaagatgcatcgcggcggcaagggagcgaaaaagctggtttatgcagcgccgatcggcgctgcaacgatagcaataactaagcagatgggtcgacgaagttaacatccgaccacacggaaatgaccgcgacggctctggctagccctccggcaccgtcagttttcaacagaaccgggaccacagacagttgggttgaagcggtataactgtcgtccccgagcttaacatatctcgcttccgcccctgtacctcggtgcccggtactgagtgataagggtttattggcaaaatcgaagaacgcgaaggcgacctgatctattgacgaggccagcgcatgcggtttgcccggcacgaaggggccatcgatccggtagagcaggcgtgaattttgaaataccgcgtcatcaccggaacaggtgctgtttatcccgatctgtctggccgacgccagtgtctctcccgcctgtttaccggctcttttcaccgttccccaatccaccgatgacggagtaagcactactgcacaggtggacggctttttgaccggtgaaaggataaccgtggtccacaggggggtcggtatgctgctggaacccgatacggccgttgaagcccagccgatagagcccacagataaataacttccaccgggttttgcattgaaattcccgtcgcggtccgggtaaatggctccggtcactgagcgaacactgatatcaaccagaccgttggcatccgggacgcagggaaggttaacgccagcatttcctttgaccagactggctgattgatacgtatcgggtgaaccatgcgtctggcaagagagtgacgattgcccgatatcaaccataaagtcgccagccttgccgacccggacgctacccggtgacgacgaagagatcaatgagtcggtccccgatcccacggtgtaggccataaactgggtcccggggggaacgcggcaggttgtcgaccggtcaaaagggccgctggtggtataacccacgatttcatcccgtgaataatcacgcttatctttattgttcggcatcatggcatagccggagacattgctaactttattccccagttcagtcccgcagtcctgataagtctcagccgcctggaggggtaatgcggtcaataaaaagagcagtgatacccccagccccatgatggttgggacggggttttctgcctcaccgccccacaaacgttcagtgtttaacatccttctctctccaaattactcatctgttcacctcgctctttcacggttggggctaacctcgctttgggggtgccccggacgtcaaagcgagacaggcgatatctcatcgggcacgccggttcaggctgcccacatgagggtcacgcttatagacatatggcatcagcctgcaccagtttcccgggggtatcggacgacacctgataacgggtggtgcattgttgattggcctcgtttccccatttaactttcacatgaccggcggacggcatgccgctcagataaacccggccgttatcgcccacaatgccgctgccggcctgggctgcgttgcctgccagcgttgcggtggcaccaaagggcacgggtttgccatgatgtgtcagggtcagcagcaactggctgcccagccggacctgataattggccagcgtcaccgcccctttggtcgggtaaacgttgcggctggtctggtcaatatcgaccccttccggcagggtggacgggtccagattgatggtgtttttgtggtagaccgatccgcccggcagtacggcgtagccacgccagtcggtctgtacgttgccgttgctgaccgtcacccctttcgccccgggtgcgcggactaacacggcggtatcgcccagcgagcgtgacagcgttagcccgtaaggatggatcagaagggcaccggacgtgccataggtaacatgccggctgtctgcgctgtcattgtaacccagattaacgctcccctgactgccctgataacccagcgacagggcccggctgttttgctggccgctgtgtccccagccttgctggaggtgataactcaggcggttatcccataacatgccactgatgccggtctgttgagagaggttaccctgcgagtcgcgtgaggcggtatagcgggtgtaaacgccccgtaacgccgacgatgatccaaagagactcagtgggacctgcatattgaatgatacctgacggttttccggccagtggccctcgcccctgatacgagaaatgttataactcaggttatagctgatccccatcagcatcgcgttgtaacccagactcaggttgttgtcggtacggccattccaataattgttgtgcgtcccggaggcgtaaagactgccccagcgtcccagtgtctgacgcaggttcacctgccaggtgttctgacgccggtcaagtgcccacggcacctgatattcattcaggctgtagcccatgctgttagcatcactgaaactgtagtaatgctgggtggaatagcggtaagcggccagatcaatgccggtgccggtactcagcaagtttttagaatatttcacgcgataagactggccgaattgtccgctttcttcctgatctttgctcctctgcaactgtgcatgggccagcgtcacatccgcagacagcgcgccaaatgcccccaatgacacccccgagcctaatacacccgactggtagttgcctgcgaccagtccgccgccatacagggtgatattgtggggcaaaccatagaccagcgtgcccatcgcaaataccggggaacggctgccatcggtcaggttgccgccgtgatattgaccggtcgtcaattcatatttaacgccgccgggacgttgcatcaccggcagggacgacgaggcgattgtcgagacgcgggtacggccattttcctctttgacggtcaccgtcaggtcgccggcactcccggtgctatagaggtcggtgaaacgaaacggccccggtgccaccgtggtttgatatatgatgttgccattctgggataccgtcacctgcgcattggcgttcgccacaccggttatcaccggggcaaaaccgcgctgactgtcgggtaacatcgcctcctcagaagccagtttcataccccgaaacgggatgctgtcaaaaatgtcgccgccggtataggtttcacccgccgtgaactcgctgcgcagtgaggggacatcacgttgcaggtaggtattgctcacctgccattgggtctgtgccggcgtggaaaagccggcggcggcctcgttgcgctgacgattgtaactgtaagtttgcgtgctgcgcagacgccacggccccagatttaacccgtcacgaaaagaagcaaacaggttacgggaacgtgatcctccccagtttccctgacggtcataacggccttccgacccgttgaccgtgtagttcatcaaaaaggccgggatcccgttatcccacagtgacggatcaaccatcccggaatagtggggctgcatagcgacctgcgggacactgagatccagacgcaaacgggcgaaatccagtgtggcgctggcgtgcgggatctgtttcgtcagatcggtgatgaggctgtcgtccgctttaccctgaaaagccggtaatccgcgggtattgaccccatacccttccagttgtgcgacggttaataccggctggagatggccgttaacctgcctgaattcaatctcgcggctgtccacccgattctggttcatgtagacatccaccagatagcgcccgggggcgacatagcccgcgttttcatacgccgagagatcgacatgactgcgttcaccgtcagcgcccatcaggaacgccggattaaagtattcccgcgctgaggcgggcagggccgttgccgtcagtgaacacagcaggcataggtataccggccgcggccggaaactgcccggttgaccgggcgcacgctggttacccgtccgcagtgcagacggaaataaagtgtttattgccatagctcatctctgcttctaatttaagcctgtgctgttgatattgaggtcgctttgccggtataccgtccgccgatgcggcgggtttataacgggacgtggcgatcctgattgtcgccgggaaaacgccagattagtggcccttgtcccccggcggtaaacgaataggtttgtatgcctttcgggggcaccatcgtctggcgggtgtggtcatccacatgctgtgtgcccattttcaggaccgaaaaggccagaaaatagggtgtgggattttccactcgcaactgcgtcccctgaagggaaaatttcacctgttttgccaccgcggcgttatcccgggcggggacgcctttagggcgataaaacagccggatattcatctgtaaagcgacctgcacctgcgagttcttgccggtctggcgctcaggcacgtgcgtgtccggtacggcgacgccggggatagcccgcaacgagaccacaaaggccgattcccgatccggcggtaactgcccgccaagctggcgaatacggaacgaaaatttcccgccggcctcaatccgctttaacggcggcaggacaacaaaagggggaacccgcccggtttgggtgtcaaagcgaccggtatcggggtccatcgggctgacaaatccctgtaccagatagccctgcgccgtatggttggtcatgctgagggtcaccccgccggggctgtctttggcgacatacgataactgcatcggggagaacgataaccccggattctccgccgcctgcgcctttaacaggccgcttagcagcagggcgaaacagaaagggtaaatcattgatccaccgggtgctcgcttgttcccgttactgactctcttcactttccacctctggataaaacaagggcgaatttaacccgccacgttggcggtaaacaggtttgaagccccgccgtaatcattaatcatcgaccagctcaccgcttttttgcctgcctgtccgacataggtcacacaatcctgcggcgctatcatggagggatagcgattcagatcgagcgcctgtccgtccagcgtgaggctgtccagcgacaggaaatacggcgtaggattgcacgccttaatgccaccgggttgcgactgaaagcggagctgtccatacgcctgttccggcaacatcggcaggccatgcggtcgccagaaaaacttaattcgcattcccacgctcatcgacgcctgatcccgagcgtgctcattcgccatcggatgggcggcggggatagcattcatctggacatacccgagcgattcccgatccactggaaaagggggcagattaaaagtcggcaaaatacgcaggctgttctgactattggcctccaacctgaacagcggcggcgtcaccacaaacgccggtgcggttttctcctgatcgcctgtgatcctcacctgcaccagccacgcctgaggtgtggtgttaaccaccgtcagcgtctgtgcccgcgccccttgggtaaaaatcacccgggttttattcaggctgataccggctgcctgacagggttctgtgccggccatgcctaaccctagacagaatagtagtggtgccagcctgtaccacgttgtgcgcatccgacctgtttccacaacgcctcctgaaacctgttacctgagcgacactcagtgatagtcaaattgaaattgaatgtgcgcggtcagctcaccgggggtggggaccgccgtgccggattcatgccgcatatccatctggaaggtaatttgaccgtctttaacggcgttacccggtgatgccaaatccacataatcgccatttttcaggtagctccccagcccgccttccggtgattgatagcgcaggccaaatcccacgtttcccgccgcagtggaagccttatcccgaaataacgtcgggtggttttccggtgtggggccggctattttaatcgccggggtacggcctgttctggctgatcccgcacaacctgacaacgccagcgtcacaggcttgttgtccgccgctgcgatatgttccgcactgcgttgcacttcattaagcggtatggatgaaaactcgacatgggaggtctgtacattaagttcacaggttggctgttccagcgtcagtgccagcgtcagttctgccgtgtttgaactggctcccccgggcagggggatggtacagagcagaccggccagtgctgtccgtccgataagggtccacggttttaacattacggtatctccccttgataggatgatcctccaccgaggtcattaattactgtccagctcactttggccgggtaattcacgcctttgagggggaaaaacagggcagagaacggggaaaccatgctctctttctgtttctgcgtcatcagctcttggccgcccacttttaaggaggcgaaggtgatgtaatagggtgacggattcgtgaccgttatcccctcggctgtcggtttgaagcgcagtgaaccaaatcctttctccggtgcaactggcagccctgacgggcgatacatcagtttaattgtgttagccatagcaatctgtatgcccccggtgatctgcttacccgagggattaccggattcggggcttaacgggatggctttcgcggtaaaccagaacagggattcccggtcggcaggcagtgcctggccggttttgatgatacggacctgattctggctgccgggctccatacgaaacaggggcggcgttaccagaaatggcgcggttttgcccccctctggggtagagctgaccgtcacctgcatcagatagacggcctctttactgctgttgcgtactgaagcggttgttgcgtggctatcagccgggtagataatgcgggtggcattgatccccactccttccgcctgtacggaagtgaccggacagcctaacagaccggccactatcatcgctgtcatcaatcttttcactgaatcacctgaaaatgtctgttttggtgttacgtaaagtaagaattggacttccctgtccaattccacagctatgtgttcctgatgcctgatggcgttgattaatgataaatttgattatttctcaataagttggaaagtcagtggtacactgacactcattcccgccgtcacatcactaggggttttagcaatcatacctacgtccaattcttgcatcacatcagttagtagagcaccttttgtaaagctaaccgcatcattgggttttaagaatttactaccattctgcacagctacagctaacttattattagtgtcgccaggcgcggcaaagtaatccgctgaaacagtggaagctgttccagaaattctcaaaccaactccggtgttaagtttggtattgtcatttgaatcaacgacttgagagcaatcaccaagttcaaccttgattttcttcgtgccgattaattgaccggatttaatagcgctctgattaatcgcgcctaagtcgatcgaggtagttgaggctcctccgtctgtgacgttgagtacacaacttgccgctcctacaacaccattcacaaccactgaattactagcaagcacatcgcccgcagcagcatgtgccatccccatccccatgcttaagagcactgcggctaatacgctggttttcatcatttgctttttcatttcattaattccttatctacatctcgtcgttaatacattttgcctaaaacaacaccatgacagattaaacaaccgggccgctagcgcggtgcatttactggtcatttagagttattttgtttggttattaactatatgaaatatatgaatattaatattcacattacgaaatcacttctgccttatgccatttggtttcaggatttcagcctgttgcataagaaaatgaatatcaaattgctcaaaaaacgaccttcaaacaggccataatatccataacaaaagaaataatttccttttgtaatcaaaaaattaagtaagtttttacaaaataatacaaaaaatcgcttttaagtgatgaaattttccgtatactgccccggcggttgacaataaccgaacaaaataactctaaatgttcggttttttgtcccatatcagaaactgatgtcattgaaagccacaccactacttcgagtaacattttcccccacgtttacactttcttacccttacgcagaaacacgaatctccagcatcacaaaagcattacattaattactcttattgattttcagcattgaagggattaatcgaggattcgttttgagccgtcatcttcaactcaattccataatgatggcagctattcaacatggcgatggcggattcaaacgactatctgaattctaataacttcgtcaaaaggggatatgaacaagagtgggttttttaatttgtggtaataacatggctgacagaaaaatcataaaagtgaccgttccgtcggtcacgaaactcagtcatcaacgggtttatcgatcccccgattggcgtcgagttcagttaacatccaaatttacccaatgtcgcttccgcaatagggatatattggtctgttaatttattgatgctgttattgcttgccggataactacaatcaaggaaaaaccagtttatcggtgtctccaatattgaagcgatctgcaccaaatgggataaattaattcggtttatccctctctcataacgtgagagttgttgctgactaatgcctattttttccgccaattttaccgcggtcatgcccaactctttccttcttttttgaatacgcttccctactaatagatgatcttgtttcattttcatcccagcctttaaattaaaaaaacaccttttttatggcatcgccaaaattattgtccctgatcctgagaaaggtcctgcctctactctgccatttttttgtaaaattgatttcactgtaacgggtacatttcctccagccggtacaaacacagccacaccatcttcacctttgctatcatttaataacaacttagctttcaagctaccatcgtttctcaacggtacaaattctccattaaggcccgttgctatcacgataatctttatgtctacattgcaggtcacattgatatttcccgtttgggttgcaccgtctagttttgcctcatcaatgctgccgtaattaagctcaacggaaccttcactgacttgacaaaagcctatcggcggtggtgcaacaccacataaagagccaggcaataatcttccatgaaagccattttgatcggtttcgtaaaatagcccgacacattcctgatgagaccgaatcgcagggccaaaatgttttgccactccggtgatcggaaaactggtatatttcaatatctccgcctgcacttgtttcattgtcttaaatctttccacgcgagtattaaatatcctatagggctgccctgaataaccatcagcaaaatggcgatggttaaccgatatccaacatgcagaataaccataacaaggatttggcgtaaaatcgttttcttggtcccaacgctcaatgacaaaagtataataggcattcgtaggaacaccttcggatttagtgatatatgaaaatattgatgcagccgcacttgatgaaaacagtgataaaaataccaggcaaacagagaataattttttcatttaagctacctaataaagctgggcaaattagtcataattcagattaaatgtcgcaatcgcatgaaatgcgcctcgcgtaatcgtctggttagctagcgctatgggttctgcctgcacataggcttgtagtgcaatcaagttttcaccctcttttaacggataggcatctccctctttattcaacggcaaccgtctgccttctgccgtttctataccaatggcaatcccagcggcttggcttcccgcacttaatgctaataaacccggcaattgcgtattttctatgccgctaaatgtcagtttgaacgatttgcccacactcatgtcgcaaccagataatctgagcagaaaaggttcgctatgggttctaccatgcagatacaaatatttttcagaaattgttgcaaaatcgagctggatatcttcatcacccggtttaatcgtgcaaggttctttaaccaatgcaccgtgaaaacgcatattatccgcagcctgtaccccttgatggccataaaccgtggcagcaataaccataaaacccacccgcaacacgaataattttaaatatttcattgagtttcctttcactggtattccgccagcaatgtcgccatcacttcaaacgccccttccggcaacgtgcttcctggttttttcaccggcaccgcttgtattaccggctgtttctgtgatgtcaccggaatacgctcattaagggtgaatgctttaccatccaacgtcagacgaatgcctaaatcggtaatattggtttgcaacgcggcggcatcaaatgaggttgacgggccaatcactgtcaatcctaaactccaacctgagatattaggcgcacagaccaactgataattcacgggctgggtataattcactccatccacctgatggatgccaacattgtgaccaaaatagacatcaatcatattgccgtcatcaataacgcaaggaggcgcttcaagcagtgtgccgtgaaaccacatattatcggctgcctgtcccggcatcacattgatgaaacctaagcaaaccgtccagaaaacacgatagatcaaatggttcattgcatgtctcccgttcactggtattccaccatcatggtcgcacccgcgccaaagtcgccgcctttcaataccgtagccatatcttttaccggcaccgcatataattcaggaaaatcaggatagttaaatttcatccagtcattgacgggcaattttcgtccgttatgaataacagcgataccaagcccagtgtgattggtttgcaacaccgccggatcaaaactggcggtgttgcccgatatcatcattttcatggcattagccggcattttttcacatttcatgctgtatttgaccggttgcatataatgaaccccgtcaatccgggtaatcatcacatcgccaaaatctacatcgatagtattaccattattaatcacacaaggtggaggtgcgataaccacgccgtaaatgttgatcggggttttacccgaaaaattaccggcaggtcttgcggctatatttccccttgttgtcagtaaatcagcctgagcactcacactcaataaacagccaagcagtaatacgcgccattttttttgcctgcgataccgtttctttattcgcagagaacaccgagaattagtcataattcaccctgaaatccaccaccgcgcgatattgcccaatccctagcgctctcggcgtccgtactggcgtcacgtaatattccaagctgtcctgtcccgcagccacaaaacgtgggcgtccccgctctcccaaccggatatcattgttagcggtatctgttatctgtaaccccaatccgctgataccgctcacccgcaccagatgtggataatcgcgatccgccggtgccacaaaactgaccgtcaccaccggctgtaaatggctccacgtcagattgccggtccgcatatcatgtacggctcctttggttcgcagacagtcacgaaacttcaatgtgaacggtatcggtgtccctttatcacctgaccgacgtaaatcactgtttggtgttacccccaaattcacctcctgccatgcagaggtcatgtccagtcgacaagccgcctcagtcagctcaccaaacacatgcagttcgccatgcaagccttcgatatcggctgctcgcttttccgccgcctgactctctatcactggtatcagccagatcgccagtgtcaatccgtagcctatccgcttgatgttcatcgtcgttcctcccggcttcgcccgtcacgacgaacgttgagccacctgacaatggttgcctgaacaactaaaaatcaattgcggccggccaccataatcattgacatatgtcagcaccggcgcactgcctaatgccccggcactcccactcagcaccacattacttttgggcgcgatcatcaatggcttaaagtccaccaccgttttacccttaagctggcttgctgcatccaccacggtgatgtaatagggtgtcgggttgttcacctgatatcggtccccctgacgcgtcaaagtcatcttctcttgccacggattatccaaatcggtacggctggcaaaaatggctttcggacgatagaacagcttgatccgggtttgtagcgcaatctgcaaggtattcggtttcttgctgcgtggtggaatttcacgcaaattaaaatagaacaagctttcccgatcttggggtaactgtgcgattgttggcagtgactgaattttcacctggctcttagcgcccggttccacccgctgcaccggtggtgtcaccactaacggaccattgattttgttaccctgctcatcttctatccatccctgcgccagatacggcaactctttgttctggttgctgatatccatactggtggatttgtccccaccgttaaacacgacgcgggtacgatccagcgcaatggccgccattgactcactgatcaccgacagacttaagatagcgatcgtgactacattaattgtattcttcaatttcatgcttaattactcattcttagaataatcattacaggtcaccgcgatacacttcggtgacagcaatttcggtgacagcaatttcggtgacagcaatcaggttttcacgctgccagtcaatcaaagttatggctgtttattgtcgtcggctaactgacagagcagtaataacgaagccatctcttcgacttttggtaattcttgtggcagctcaatcacacactgcaactccccatcccaacgcacatccagtttctctgccggattgatcccgctgagatagacattcccaccatcactgacgataccgatctcccgttgatccttattcagcaccgttgccccaaacggcggcgagctaccatccgacaagcggatcatacccatcgctttttcaccggatatcacttggaatttacgataaccaatcgccccttccgtcagtgttgcttgttgtaccgaccggattgcctccacattgtccggcagtttgttcaaatcaatactcgcactgttacggtaatagttgtttacatcagagatcaccgccttaccgaacatattggtatgggtaatcgcgccgaagcctttcaccggtacgccacctataccatcggtatccaccatcaaacgggtggtcccgggcatattaatacgatgcagtgccgcgcctttcggcgtcacggtcatccccccctgaatagaaagcgctcccgtggtataacgtccatcctgataactcgcactggtcgtcagttgagcgcgatcgccgtaatgggttaaataaccgttagccgcggccttgccgtcaatactggaaccaaccgctaaacgatagttactgttttcattaatccggtcgtaataacctaccgtgtgggaattaccttcccggttggccattgcgttataactgatcgttcctgaattaccccacggcagggataatgtcatatacatcccgtcgtcatttttaccttcatatttattacggtaagcagacagattcaggttaatgttcttataactgccaatatcaaaataacgtgatatcgataagttatagcgatcgttattcgaacggttccaataagtctggtggctgtaattcaagtaaatactggtaccaatatgtgtgaactgcttattcaacataatggtgtaaagttctttattactctctgcatcaccatcgtgataacggcgatccagatactggctcatactcataaagtcacgttccgagaaacggtaaccggcaaaagtcacctggctgtcatactcctcaaaacgcttggaataactgagacgataagagccaccagtcaatgtttggtcctcatccggtaaatgggcgcgggattcagtgacatcaaaggaaagtgcgccaaagaccatcagatcacgcccaatccccaatgacaacgcgttataattcccggcccccaatatcccaccgtacagcgaccaaccattgtttattccccaagaaaactcaccaagaccaaagcccgatccctcactgtgatgtttccagttagtcggcttacccgccgccagtttgtactgcacccggcccggacgggttaaatagggaatattcgcagtatcgatctgaaactcctgtaaaccgccatcctgctcctctacccgcacatccagtttgccgctcactgcatcattgatgtcctgaatacggaatggacctggcgcaacttgggtctcatacaacacccgtccctgctgacgaatagtcactctggcattggttttcgctacccccgtcacctctggcgcatagcctcgcaggttcggcggcaacatattgtcatccgtcaccagactcaaaccggtaaaacggaagctgtcaaagatatctgaattaaggtaatcctcacccaacgttagcttagcctgccaatgtggtattgcccggtacaagtaataacggctccaatcccagtttttctctgtgctccctgcccgccccgtgacgtggttatactgtgattgccagtctgcccgtagccgccacgcccccaaatttatcccggtcgtaccattagcactgacattctgattttcacttcccttcgccggcttagcgatctgagcattgacgttataatcaaacatcattccgaaaatcccctcatcccaacgtgacggcgggtcccagtctggtgagtgatattcgagataagcctgaggcatactcaggtatagcgtgtcactgctcagatcaccgcgcactgtcatgccaggcagcgttttaatctccagacactgattattgttccaccaggtcatctttgattcccattccgcccgcagccccaactgcttcaccagctcaggcggcaaacacgccacactccccttcggatcatccggtggtaccataaaagtcaccggcatctccggcagctcgctgttattcagacgtaccgccatctgataatcccccggcatgatataaccggcgcgggaaaattcttttaaatcaatccgagcccgatcctgaacatccaacacatccgtattaaattcaatttcctcttccgcatacaccgcatgagtacccattaaagcaagcaataccaaaacaataagaggtttcaggacacaccgaaccgagaccaccctgtcatattcagtggtcaaacccaaaaacaaagccataacattcccagatcgatgattagtgataatccagcctgaaccgaaccgtggttcgatactgccccgcttgcaataactggtgattactcactaatcgcattgcgtaattaagggtcatctgccctgcctgtaacccctccaccggtagaggagttcccggatatgcctgattgccgtacatgtctgtaatttgtaatgccactccttgagctacacccgataaccggaaattgttcccatccggtatgccatcaaacatcacctgaaagtgacgccaatcgggtttacccaaagtggcagaagtcagtacacagttaatcaaacggatagaaaaaggacgcacgggtccctgtccatcatgtatcatccggcttaccgggatcgtggctaactcaatcgtctggtcacgactacctgcgtcaatcgcacaggccgtatcaatgatggtgccttgcatgctaacgcgaccatatccttgcgttccttgtggaacagccgtttcagcttcaataacacaggaaaacattaacaggcagggcactacaacaacggcagcatatcggctcatgacttctctccagctaaacttatccaaaacttttgattaggaaacgcccgcctccttgtcagcgtttccgtgcatgaaaagacttattggtaagtcagctggaagttggcaatgccggtgaaattacccggaacaacggcatcaggtgaagtatcaccttgaagataggcagcaaaatgcagatcattatcaccatcatgcagagcgacagctggtgaaggggtacctagtttgattttgttaccgcccgcatcagtgatcgcaatacccgcacctttagcaacgccttcgatacctagcaaaccatcaccgccgacgatgctagatttagccccaacaaacgtcgtggtgactgtacttatcgtttcagtcgtacagttatctaaagaaattttgaagggcgtggaagaagagcggccaccgttttgcaaagatgcgctagaaatagagcccagtggaactacctgatcaaccgtttctggggtgatagaacaaggtgcatcagtaatagacccggtaaaagtcaccgttccgtgaccttggctaggattcgctgcatttaccgaacccgcagccaaagccacacctaaccccagggccataaccaatttattcaatctcatgtgaactaattccttgaatttaaggataaaatacccataaccataaaaaaataaccgtgcaggattccagctccatacacctgatattcagcgcaaaatagtttaaaaatctcggattaatattttctaaaccaaacaaaatgcaccaaactgtttttttcagtcaaaaacactaagagtgcataatatttcggagttaacattctaaaaaagacattaatttgaatttataatctaattaatcaattagtatttgattgaattcagatgaacccactaattttttacaataatttgatggcaaaatatgaaaaatagtaaaaaataatgaaaaaaatccatatattataaatagttaaatattagtaatttggcattacacaaaatttgacttagtcggtcgttttataggaacatatttacagtttggtgcattctgtttagtttctttttattgttaaataattttcaaatatataattacaaagcttacaagctgatattttctattaaaaaagggctatttataactatctaaaaacggtatttataaatttttgccaaaataaatagcgttatcagccaataattttataaaagttctattaattgatatattccggtagattaatattatttttctacctataactatccgccccaattgcacaggaattattttcatgaagaaacgtaagtttttaacccgatatgaaattaatgcgattttagaaaaagcgcgtcaaggatgtcatgctgagcgagattattgcatgctactaatgtgtttcatccatggatttagagtgagcgagttatgcaatctcacgttatccgatcttgatcttaactcagaacttattcatgtcagacgattaaaagggggattatcaacaacacacccactaataccagaagaaattaaagctttaaatcaatggcttaatattagaaagagttggcgagaatcagattcagagtgggtctttttatcacaaaaatcaggggctatttcacgccagcaagtttatggtttattaaagcgttatggcaaacaagcattagtcaatatttcacctcatccacatatgctaagacatgcctgcggttatgctctcgctgatttaggaagagatacacgccttattcaagattatcttggccatcgaaatatatcccatactgttatttacaccgcaagcaatgtaaaacgatttttcaaaatatgggaggctcctgcaaaaggactcgattaatttcaatatctattttctatgtaagacatgtagtatgagaaactatttctctcggaaacaaaaaaatcatccaatcgtccgattataaaaatccttatccatatactgatgaggttttttatacgaaaaaataattattcacatcataagatactacctattatttcttataattacttttaaattaaattcaatagaaataaatagcttgcatttacaaataaaaatatatttttaatggatatttttggagcaataacccatcataagcagcacaacaagatgaacaatcccattgaaaataaaaatgaaaatgaaaataacaaggcaccgataacacaagacaaaacagtacatatcatcggtttttgctaaagtatgagcgattgcaagaggaatttcctcaaagaatataccctatggatttcaagatgcatcgcgacggcaagggaacgaatccccgggagcatagataacgatgtgaccggggtgagtgagtgcagccaacaaagaggcaacttgaaagatgacgggtataatatatatttattaaaattgaacaataatatcataattgaaaaatcgctaaatatataaataaactttagctgatatccaagacttaaatcggcctgcataataaaaccaaacaagcatataaaagtaaaattttcttggatttttttaccgcacttatttccttaatccatgcgataaaatactaacaattcataatactttcttattaatctgaatggttttacaataaaaacatctgtatatcatcatgatataacttcaagcaatatcattcagatggcttgaatcaattgaaccaatgcataaacaaactcctcaccaattttggttaaggattgcctgaattaggacagtgattaatcttcaatatttgattaacggtatgtaaataatatgcgttttttatgttaataacaaaggctctgaatatatcgatccccctcacgatcttaaactatacttagtagatacagttcatgcacaaagagattgcctccaaacagaattcagtagagagcaagctggttaggccagattatctgttgtaaaagctattatggatattagccactagaattgatgagatgaccaaagattttcgtatagcagctaaacatatctggtattccgacaataccaaccagaaaaattcaacaaaatattgacaatagatagcacacatggaaagaatcatctcgaaaccattaggagattagtgatgaatgaaaaattctatcaattaaaaataacacttacagactcaaaacccgctatttggcgacgatttgttgttcctgcttctatctcattcgacagattgcacgatgtgatacagatcgtgatgggatggcaggatagtcatctacatgaatttcgtattggcaaactacgactaacggaaatgccagaaagcccgtctgatagcaaggaagaagatttatatcgcctaattgatctgattaaacaaaaagggcgatcttttacttatctctatgattttggcgatggttgggaacacgaaattattttagaaaacagtcaatatcctgcaaatgacctcccgcttcctttttattgtctggatggcgcccgcgcttgcccctttgaggataccggcgggattgatggttatgaaaatttaatcgcaatactgaatgatcctgaccatgaggaatatacagaaatgcgacaatggataagtgaattacttgagttagatgaagatgaagatttcgacttcgaacaatttcccattaacaatattaatgcttttctagcgctctattatcgctggtcacgagatcgttatcatctcttgtgggattgggaatgaatttaaccatgggataactctatcatcattgggaaaaatttcagatgaaccactatgacgaactgggtgcttgatttgaattaatttttcccatctattttctttatgctcaattcactcgcgaaacctaaccccgtggcgctcttttatttatagcaatgactgggtagagcaggcttttccgctatacagcaatacactgctggcgcaaagtccctggctagttcagcccaagtcaggctgtctgtcagtaattggtcatctgcttgatagtcatactctgagcgataacagttggggttgggcttaccgcagtgatcagtcatggatacagcagcatgcccgaaccgcagatttattatcggccagtaaattaccccgttgttatcccgaagagatgtgatattggctaaaaagtcacatatagaacgggagctataataattactgattcctatctttatcttttataccgttattatttattttgatttaattttgatattgttctttttgtttattttttattcaccaccaaggtgcctcatttatatgataatgtgatttattttattgttaattaataattttccattatgtttatgtacctattattgattattttgcttttcattaattacggtaaatttacttataaatcataatcttatgctttttcgccatgatatgttctctatcctgaatgaattaaatgtttttttatcataatggtgatttattttatttaaattaaataaaaggttaatacagctaattttttgttatattttggattttttattaattttttttgttataacctttatttaattccgacatggtgtaattatgaaattttattgacgttattaatattattgagtattatcaatgcatatgattattagttgattactcctttgccaagtgttcttttttctataagaaagagggcaggagtttatgaacttcattggaatatctaaatttagaaataaaatatttttaatgatgggaattatatgtttcttcatgaactatggtattttcctatttaaaaacgccctaagatatcattttaatattaactacaaattggtgaaacataatgaataaatcagaaatcttttttatgattaaaaacattttgacgaaagaattaaatgtcggctctcttaatgacatgagtgaatcaacatcattacgtgatgagcttgggctagattcgatgactacactgacatttttgatgtcactagaggataatgttccaaattttatgattgatgcaaatacattggaagccagtcatgtacaaagtattggttctgtctgtgattatgttttagaacgactaaatagtgtatcatgacatgatttacataaatcaggttttctgcgaaataatgaataagagatctctcagaaaaactccaagaaaccgttactccatataccagaaagacttacatcgtatttctcaagatgaattaactgattcaaccctattagaaggtgatcaatactcttatactgaattaggcgattctgttcttaaaaaaatggaagattctattcttttaagtgatattgatttatctatatttgcctattggacacctgagtttgatccagatcattcagcttttggtccatattttatggaccattataaccttaaaggatactcattcgacatttgtgacaatggaagtttggtatcaaccacagctttaagtattgctggtaattatttatctagtggtagtgcgagtaaaatattattattaggaatggagcaaaatactattcctcgtaatatttctaacggatttccaataccaacgcaatcttgtgctattgcagccttactcacaacagaaaaaagcgatgaaaataaatggatattattaaaaacagggcaggtaagtgaatgggagtcggctgaaagtttggatgcctttggcatgttaagaaatatattgcatcaattgcagttagatgaagaagatactatattattaacagagcgtacaggttatttctttaaaaaaatacgttttcaaatggaagcggaagatagaaaaagttcaatcaaatttgctttcttcaaacctgaagttacaggaatgaatgcattgttacttctagcggataagacactaacaccactaaatagaaggaacatattattagtagaacatgatatggaaagtttaagaatagcatggtctgtcttacaaaaaatttaggaatataatcatgtttaatatcagctatccattcgaatcaaagaaagaacaacgttttcactggttgatggaacaattagcccaaacagttttctctacatcaaaccaaattgttgtgagaaacgggtttgctgtagtttcagaagaacaatggaaaaattcagaattatgctttttagacgaaaaacaatatagctggaaagaaagaaatactgtcaccatccttcctgtctgtaatagtatgaagcgccagagattattattatgcaaattggaggtaaaagacggtgatattgcttcacaagagatagcgaaaaaatatgtcaactatcaatgtgaaatgatacgaatgcagcttatttggattgaacgatggacatcgattttacttgatcatacagcccagcgtaagattggcagtgtttctctattatcaatttcctctattcgtctccgtttggcacaagttatacaacgtcaattattattatctcagtgtgtaggagacataaaagaagaaataccttcacagtttgctgagcatgcggctgaagaaattgaagaaatggttaatatcctgattaaaacaacgggaggaagggctcttctacagcaagggttggtcgaaatgcagcacattttttctgttctgaatcaagtttatctgagggagttccatggttaattttgacagttctattgcctgtacacattatggaaaaaaatggttagagttagctcaactatttcgctctttgtctttgaaggtgctagatgataaggatactgtattatcacatcttgacgcaccgcttttcgaccaactttatatggatcgcagtagtagctgtctggaaaggacaaaaatgtatgaggtgcttacttacggagatccaaatgtcctgctgtcatgtccaggcccatctctttccggtatcattgtacgagaattaggctcaactaaacaacaagactatttttttgaatatgttgctcagcataaagctcgcacctgtatggcagtcacggagcctggcaaaggctctgatgcaggaaatccgtcttcattgttgagtgataattttgaacttaacgctgaaaaatggctagtaggtaatggactcgatgctacgatcggaacaatggttgtcagaactggaacagggccatacagtatcggtgtaattttgttgacacctgaaaccctttctcatcctaaagtttttcgtcagttgctacctgttgctggactgcaaggtgctggcttaagccacctatattttgacaaaattcctatctctgaagagcatattttgggcttgcaccgtagaccattagagagaggtatgcactcagtgataaaaactttttatcgtatgaggccttgtgtatgtgctatggcgttaggtagtgctcaatcactacttgattttgccatatcgcatataagaaatgtaaaagctagagagctccactcctccttgcagattgaaattgaagccataagaaatctgaattaccgtgccgcttcgagaatagatgatgacatattggatggtgcagctgtttcactggccaaagcttgttctaccgagtttgtggaaaaagttgttcatatcatgccacagcttgtgggaacagagctctttctaacagatatctggttacagaagacaattactgacattcaaggatatgaatggatggaaggaagtctggatatgcagcgtctaaatattttagctggatctatatagtttattgaatatattaaataaattggtaattgatatgacaatgcaatccatatttcagcggagacattttcagcgatatcagtggttgaaattactcagtgatctttggaataccagcattacactttggggcactatggtagtttctgcggttgctgtgttaatcaacattagcattattagtcataattcacctaatatgttatatgtaattggattattcttaccgcttaattatatgatgatgtccatccatgaaggattgcgtgtacctgcattgcggtatagttcacatttaagaagtgctaatttttctctactaggacaacggttgttattgttgtttttagctatgttagcattgatggcaatacttatattcaatgtatggtattttcaaagtggtatttcttatttgtttcatattgaatcttcacagcaagatgaagtaatgaattttattattcctatgctttttattgggataatgattggttttgccacgttaattttatccactttatttggtcttggatttaatcgttgtggaagtttactaggaatatcaggtacagtactaaatataggtgcaacttacttaactgaaatatattggcataagggcttacaaagcctgatttggggggcaatttttggtagcagctatcttatttcagtaggcagtattttactctatcgtcaaggcgtggttatatcttggttaggaatgcgtgatcaagttattcaagtaataaaagatatatctacgatggccttacccgtaatgggtagtttctcccttgtttttatttttttattttcctttaattatctggtgtctttttatgatgcccatgaaatagcagggtttagcatagcttttcgtatacagtcgtttattattttgcctgctattgccttaggaacagctatggcaattcactataataattctttatctaaacggaattttgtcagagctaaccaagtatttttgattggtcttagtctcactggtgttatatatatatttattagtgttgctgtattctttttgaaagtttggttagttaaattttttactttagatgaactgattgctgaggcggctttacgctatttaaattgtgtatctccatcttattttagcttaggcatagtattggggttaatgactgctttagagcagattggtcaaggattacgtgtactacttatcaatatcaccttatattctctggagattggaatcgctgcattattaggattaaagcaggaggatgctacacggttgtatctaactattgctatttttaattggatttctgcgctttacatttttagtatttttaataaaaaaagcgattttaatattaaatactcttccggtgatatacactcttaattaatttaattatcaggatgattacatgaattataatttggttgagattattagagatgctgaaatggcatatccccaaaaaacagctttaattttcaacaatcagaattatacttataaagatatatggaggcaaatatgtgctattgcagcaggtatgcgactgaatggactacaacaaggagacaaagtagtaatttgtttaggaaatcatataaactctattgctatattttttgctgcacaaaaattaggtgcctgtccatctatcatagcatttgatacaccagaagaaaaaattaaatttattttaaacaacagtggagctagttttttcttcacttcttcaataattgctgcgacattactaaaatatgattatttttatttttcaaatattaatttgattattgataaagttgagaatatatatgctgaaaataatttaattaattttgatgattttatttccgatccaatttctgaagctaatattccacttcaggcaattagtgttgatttggcttctattatttatacttcaggttctactggtgaaccgaaaggggttatgttaagtcaccaaaatatgatggcagctacacggtctctggtaaattatttagaataccaccacgatgatacggtaatggcagtattaccgattgcctttgattacggactatatcagataattttagcattttttgttgggggaacagtggtgcttgagtcaaataatacgcctccaccagtagtattaaggcatattcaacaataccgttgcacaattatgcctgggctatcatcactgtatagtttacttgatatttatgctagtaaaggttcttttgatttgagttctatacgccttgtctccaatacaggtatggctttgcgtaagcagcatgtgtcaatgattaaaagactattccctacagccaaaatattttctatgtatggactaacagaatgtaaacgttgtacgtatcttcctccagatgatctagaccgcaagccagatagcgtagggattgctatcccaaatactcaaattatggtggtagatgataataatcaaccctgtacagcaggcgaaattggacagttattaattcgcggagaaaccgtaatgcaaggatattggcgcaattccgaagcaacagaaaaaagaattggcatacatcctatttatggggatcgttgtctatattctggtgactatggttggctagatgaagaggggtatttttatttcgttggtcgtatggatgaagttgcaaaaatccgtggccgcaaagtgattttcagtgaaattgaaaaagttttgtttggccatgactctattatagaagccgcagttattgtacattctggtgaagaaagctctgaagatagtattattgcttttgtggcaactcagacacaagagaaactattagaatctgatttaaaacatttttgttctaatttattagaactgcaccaaatacccagtgtttttatacaactatctcggttaccaaaaaatgcaaatggaaagtttgataaacatcaattacgtcaaaggtaccaatctataattcaggagcggttcgcatgaaacgccatcatgtgatattgacatcttgtgctattgtagcagttatttttgcgggaatttctatcaacgtggttgctgttcggggacttaatagtactgaggagaaagatagcaaaatatctgttacacaaaaaggaccacagccaatcttggttgaaacagcgcaagtcacttcaatgaattggcaagatagaaaaagtgttattgctacagttaagtcaatacgctatctctctgttcgagctgaaatatctgggaccattttgcaaattgcacctgccggagggcaggtaccaatcaatggggtattgtatcattttgacgaccgcgttgagcgttttcagcttaaggaaaaagaagctcacttagatatgacccagaaaaatactaagcgtgccgatttgctggtgaataaggcaatctcacaagctgctcaacaggctgagcacgttaacttagctcatgctgtcagtgaagtagaaaaatttaaaaatacattgcgtaaaatgatggttacagcgccatttactggagttgctagtttacatgatttgacgccaggacaattgattcaggaaggccaaacattattttctttttatgatccaaatgatttatatgttgaatttagtatccctgaaactgatattagagctctgtcacctggtgtccaaattaatgtaaatgatactgtcgctggctttactggtatagctaacattacattggtcaatactgaaataaatcctatcaacagaactctaacgttacgagctaaattggaaaaaggccattttcgtcacggcgctagcgttagggtgacttatcctgcgagtgctcctcagatgacacgagtaatacccaaagtttctgtacgttatagtgcctatgggcaatcagtatttgtagtaaaagacaatcgagtccagattcgctctattgttactggagacgataatgagggcgttgttcaagtaaagaaagggttagaaaaaggtgaattagtggtaacggccgggcaaatgcgtctatacccagatgctcctattcgtcaggaaacccaccaatgaaaattatcggcctttttttacgtcgtccaatcatagtaacaacatttagtggtttgttatttattgctggcttgttttctatagggtatctaccagtaggcctttatccaagtgtagatgcagatgcaattagtgtcagtgctttttatcctggtgcctcggcagatctaatggatgggcgtgttacgtcagaagtattatcggcagtatctggaattgatgatattaactacgttaccagcacttcagaaactgggcgtagcaaggtagtattgcatttggcaatgggtagtgatactcagaaggtattaactaatatcatggaacgagtcaataccatatctcattttcccgatgatatggaatcaccgcaaatctcccgccaagaagcggatcgagttcctgatttcgcattatcatttactagtgaaacaatgcaagctgcgcaggtatcggattttttgcaccgagttgttaaaccacgcttggaatccttaaaaggagtggggaatgtagaaatattgggtagtgaatatgcaatgagaatttggttagatccagagcgtatggaacgccacggtgtaaccgcaatagatatcagcaaaagtttaaaattggagaatgctcaagcgaatggcggtgctttacatgatagtaaattacgttttcaacttgtgccagaaacagggctttcaacaataagtgattttgctaatttatctattatgaccgcaacaaatatatctccggttcgtctaaaggatgtagctgacatagaattaggaggtagtcagccggaaattaaatctatttttaacggtaaacccgccacaatagtattgatcaactggcaacaaggtagtaatcccttgttggctgctgatgatatatataaaactataggggaattgaaatccagttttccttatgatctacagtctaacgtgcttatcgacagtagtgaatatattggtggtgcggtacatgaagtttttatcactattttacttacttgctgtgctgttaccctagtaatatttttgggagcaggaacattacgagctgttgtgatcccagttattgctattccactctctttgattggtgtgtgcttagttattcatttgtgtggtttttcaattaatacactgaccttgctagcaatggttctagccacagggctggtagtcgatgatgccataattgtgttagacattgctctacatcgaatgcgaatgggagatactccttatcaggctgcgttaaaaggagggaatgaaattgctacatctctagtcaccatgactttaactctagcaatcgtatatttaccattagcatttattggtggaattgtaggaaagctgttttctgaatttgcagtgactcttgccggagctgtcattatctctgggatattagcacttagcttaactcccgtcatgtgcgcacgtatgctatcaacaaatcatcaacattcactgatggtgatacgagtggaaaaaatgtttgctcgcctccgtcgcagctatgagcgtgttttaatccggctagtgaaaactggaaatttcccactatggttatgggcaactacgttagctggtgtaatcattttgttcattatattacctcatgcgttggctcccaaagaagatcagggaagcttaatggtaattgcagaaggccccagtgtcataggaacagactatattgagcaacatacacctatattagagaatatttatagtaccttaccggaaatagctaattttaactatgtcataggcgtaccaaaagacaaccaactactttcttttgttcgattaattaattggtctgaacgtcaacgttcaacaatacaattacaaccagaattgcagaatattatagctaaaatcccggcgttacagtcggtagtaatcctgccttcttccttgccaggtgtcggaggattacctttccaatttgtgctcaaacatgaagataaagattacgctaatctagatgcgcttagtgatctaatgctacgtgaaatgcgtgctagtggtctgtttctatttttgaaaaaagatttgaaatatgatactccgcagattcacatacgactagatcgtgaacaactggcgaaagtagggatttccgcttcagatgttggttatagtatgaatttggcatacgccaatactaaactacaacctttcatttatgaaggacggacctataacgtcatcatggccttgaaaaaaactgaacgggctgcgatacaatcactattagatctacaagtgcgaagtttagatggcaatcttatcagactaggaagtctggtgactcagaatcctgaagtaggtcctgaatctctaaatacattccaaaaacaagctgctgtgacactacaaggtgtgttagccccgggagtagggcaatcagaagcaacagagtttgctcttcagctactccacaacctcaaatcacaaggagtgtcatatgacctatcaggagaaacacgacaaagcaaagaagaaggacagcgtttactagtaacttttgctatagcattagtaggtatttattgtctattagcattacaacttactaattatctggggccactcattgttttactgggtagcattcctttttcagtactaggtgcattactagcgttatcttggtttgatgtgccacttgatatgtttacacaagttggcatgctgactctggttgggttgatcagtaagcaaggaattttaatggtgcaagctactgatagcttgcacaagaaaggtggtattagtatttactacgcaacagtgcgggcttctgcgtctcgcttacgtgcaattgttctaactacgctgactatgatattgggagccttacctcttttatttgccagcggtccagcagcagaatcccgttttgaactgggcctagtgattatcatgggaatgttagtaggttcatgcctcacccttttcctgctaccttcgctttatatctttgtacataaaaaaacgagtggagccacatcgtgagtctaataatcaatgacattggtgtttatttgccagaacagaaaattggattagaacgagttcctattgagcctcaattatctgaagatgcaatcaagatatatcagcgtttttatggattaaatcacatagctatcagtaagatatctctggaagagatgatgtatcgggcagctcaagatacgctgacacgtaatggtatagcaatagaatctattactttacttattcatgcccatactgctccagaaacttggacttatccaaataatttgctgtctaggttgaaccggcgattggggctgcgtaatgcaacttgcttctccattcattcgaataactgtgcttctaatcttaatggattgcaggtaattcaaaatcatctaattggaaacagtggtcaaggttatgcattattgctgacagctgacctaacttttagcggtattctacaacaaattcccaatactacgttgtgtggcgatgccgctacagcttgcataattagtctggggggtgatggagccaaaatgaaagccttagagattgattactatggacaacattctaaaggctcctggcaaaccgcagaagagcaagtgcgatttgaaacccactatgctggacgcctagccaatgtaatggagcgctgtttaaaacaatctaatttgtcttgggaacatatccgttgggttttcccccataatgtgaacttgatttcatggcgtgatgcaacccaaaaaatcgcgttacctctgagcaaagtttacttggataaattacctgaattaggtcactgttttggggcagatatctttatcaactggcattttgctagagatacactgcgattaggagattatgtaatggttgccactgtaggattaggggcagtattcggtgctgctatttttcaattagttaaagaggacattaaatcatgagagtttttgaacacttaggtgaatggctgcatgatagcgcactgaaatatgcagattaccaagcgttatctattaataatgatgtatatagttaccgtgagctacatgagttagcatcccttctggcccgaggtttctctctttcgcagggaaaatattgtgctttgcttggaaaaagaaacgtaggaattttcgcaggtattgtagcttcattgtgttacggtaagacttatttgccattaaacgaagaccagacacctgaaagcctgagtttattatctaaaattactgattttgatttattggtgacttgtgctgaggagcaaaagttattgcacgatttgttgaaacatatagacaaaccgttagtcataattttgtcagatagtaaacaacgccccaattggtgtaacgattacccaagacactattttctcgcgcatgctgatttagccaagattcctactgcacaaatgaagacagataatcctggtgcatatttgatgtttacatcaggtagtacaggtaatcctaaaggggttgaagttgcacatacgaatgttacacgctacgtgtccaatactatagctctgtatcaaccaacctgcgctgatcgtttttctcaaatttgtcctctgggttttgatgtttccgtccatgatttatttgttccttgggctattggagcatcgactcatgtttttgatgccaaaaacagtttaatgcttggaacgtttgttcgagataaacatctgacattttgggcatcagtgccttctattattttgtactttcagcgctcacgacaattggaacctggttcttttcctaatttacgccaatcgttgttttgtggagaacctttgttacagagcatggctaaaagctggcatatggctgcacctgcatcacatattgataatatttatggaccaacagaagcaacagttgcaatttgtggttatcgctggagtcctgagccgacagaaactaatgaattgattgttccaatcggaactccttatcctggtacaaagttaaagattggacgccagcgtcaaaacgcaggggatgtaggagaaggtgaattatggattggcggtgagcaagtggttagtggttacttatcaagtaacactatgcaggctgataatttcgaatatgatggtagttgttattggtatcgtactggagactgggttaaacgtgacaatgatgggatatttcattttttagggcgttgtgatgatcaactgaaagtcaatggtcagcgtttggagcgtttggaaattgagtcaatgctgagtaaagcagtaggggttgacgatattgcggttattggctggcctgttatagcagggaactgtgttgaaggattagtgttttttatttcttggcatgaaaaatctaatctagagctacgtaaaatatgtcaacagcttatgcccagaagtatgtggccaacaagattagtgataggggctattcctaaaaatcgtaatggaaaaacagactataagcaattaaagacaaagcttgctgaaggtagagtgtcttcttaatgatcagtactcaacttatggaataaaaattcaatttaaaaaaatcagtatccattaattatatactcattctacttttagatgctggtttcacatgcgatttattttaaataatataattatgaggttagaagcctgcatcttcacgcttaaatgatatagaaagaaagtaaaaatatttcttaatggaattaaacttatactgtagtgtaggaaatataaataaaatgaatgatatctataacttaataagaagagtatcgtataaagttggtaaaaataacattagtagaaaaaactttttgtttttggcatggaatttaatcattttactaagaaatggcaataaaatggagacttattcaaatgctaaatagagtcaatgatatattgcacatcattggtagtggagtaatgcattacaattggctatcttcattaggaactatttctgctactctctggtatcctgcatatgcagggagtggtaccgtaaaacgataccgaaatatattacatgcaaaatcagaagaaagtgcgatccccatgggaacaaattggccattaatagtaatttctcatggttctggtggttcttgttttgatcaatcataccttgctgagtttttatcaacacaaggttttgctgtgttagccgtggatcatcaagatattcaggatgctcgctatcgttggatgaatttgacaaccagacctcaacgtttagtgtatgcatgtgatgcgttacttttagaggccctaggcgagagaatagacttttcgcgtccattggtgataggccattctgctggagcgtatgatgtattagtgatgtgcggttgtcagccctgttttgaactggaacccgaactttcatcagtactcaatgaactatcgtgttttgcagttgagcaatgtttagttaagggtatttgtgctgtgatcttactagccccagctttgtcaaatttgtttctcgctaatactctaaatgagatgcttttaccgactttaattttatcaggtgaaagagatactatgaagttgctaggatcaccgactgactacgcaacgcacttgccccacgttgaacatcatatcctctttggagctggtcattacgcttttgtttatgaattttctcctttattgaaagcattaaattcagtcgttagtggtggtgattatgtaccaagaaaagagttgcattataaaataatgaactatatttcagcttttataacaccatttaacacagaggaaattatatctttgccaagggaaccgattcatgcttgatcctattaatcactaccggcagcatactgaggtaacattagcagcatcatattcatctcagcttgatgatttacctaatgatgtggaagggttaatttctattgttcagaatttattgattcactatcagacagaaaaagataaacttaatccagatatcatttctatgcgcaatacagaaatagatagccgctgtgtttcactgatgctaaaaaaacttttgttacttgatgattcaagtttttcaaatcctcggcccccagaaaaacgtctattatctacttgtcgggatttttcggttttattatgttcctttatgcgacataaaaatattccggcaagagtccgctatggatttgcacattatcagtataacgatgaatgtccgatgcatgatcatactttagtagaatattggaatggtactagatggttatatgccgaaagtcgattaaattttttgtctaagccattattgggggctaatccatcagattttcctcgacatttattctttagtggagcagaaatatggaggcatatccgacagggaacaatgaatgagcgtattttcagtggatatcgatttgatgatggatatgggcaatggatagtacgtaatttattctttttagacttagcttcactggctggatatgaaccattgatatgggatagctggggaatattactggaggaaaatcctggagccagggtgacggatgtgcaacaactaaacttcttggatcgtatggcattgttagatccttgtttacccgatgaatgtaatgaactaattacgtcttttaataattacaatgaattgagttatcaaggaaaagttcatagttttagcccagtatccggtgcttattgtgtcgatttacatgccagatggagtaaataattcatatgatgacattagagacaattactagctatgtacctcaaaagaggcttaaggttgaacgggaataccaacgcttaggtttaacccaaaatgaagcgcgggtgtttagccgtatgtatgaattaactcattgtccggtagaggaaggcagtgaagaagaaatgctgctaaaaccctgcaaggaattatttcaacaagttccccacattaagcaagaagtcgtactgctggtttatgctcatacggggactataagtagtgtatggggtcaaaatatggcttcattacttgttcggtgcctacaactacctaatgctgttgctataggaactagcagcaacaattgtgtatccatattttccgcattatctttagcaaaacattatttacaaaatgcgcttcctaacagtaaagctctgatagttgtcggggaaattgctgacagttttgaactcagaatagtacctaatgtagcggtaatcggtgatgcctccgccgccgctttgctctctctgaacggtcaaggttcaagcattcttgcacattctatacatacttacccaaaatattctcaaggtatttggttaccaactaattctgctgcttatcgagatttcacagcgaattatcaactcagattacaatctgtaattcaagatgtattacagcaggcggatattacgatggatgatatatcgtatattattccacataatgtgaatattttgatatggcgtcaagcagcaaagtttatgaatattcctatagagaagatatttcttaaaaatattagtgaaacagcacattgctttggtgccgatatgcttattaatttacatgcgttaaaaaatagtggagcattacattcaggagataacattttgctgatttctgccggagtaggtggtctatttggtgcctctttattgctttattcgtgattaaccagttctggatgtaaaaactgtaggctatagttaattattatggagataccctttgttttttaatcaaacaaatgtatttttatttctatggaaatagatgggggtataattttaaaaataccagagattaactccattcataagaattttataattctgttggtggattataccctatggatttcaagatggatcgcgacggcaaaggagtgaatccccgggagcatagataactatgtgaccggggtgagcgagtgcagccaacaaagaagcaacttgaaagataacgggtatatatatactaatgctgtcttttcctaatgtgaggtaaattatgaatatagaaaatagaataacacagaaaagtttatcgatgaaaatcgcagaaacatttgtcattaaagacgattgtttggaaataggaggaataccattaacccgactggaaactcaaataggacagactcctttttttgcctattctagaaaacatattgaccaacaagtgtgtctattacgtaaatatttacctgaaaaaattagtattcattatgcaattaaagcaaatcctttcgtaccgcttatccaccatttgtcccaaaaaattgaagggtttgatgtcgcatctgcaaatgagatggcattagctctaaatacaggcgtttctcctgaagatattagttttgcagggccgggtaaaacagatacagaattaaaaagagcaattgctgcacaggtattgttaaatgtcgaatcgttaaatgaattacggcgaattcaaatattgtctgaaaaacttggcttatgtgcacgtgtttctttacgcataaaccctgattataatcttaactcttccggcatgaagatgggaggaggaccacgccagtttggtatggatgtagtttatgtacccgaagcactaatgttcatacgtgattatccagattccctagtttttgaaggattccagatttaccctggctcacaaaatttatgcgcagaacatttgattgaagcacaaaataaggctcttaatttagtaattgagttatcacattctgctccatctccagtacgtcgctttaatctaggaggtggttttggagttccttattttcagggaaatacagaactgaatattaccgaagtgggcaatgcaatgcacaaactagtagagcgtgcagagaaatttttaccggaagtggaaattattttggaattaggccgttatttagttgcttcatctggaatttatgttactaaaattgttgaacgcaaaatttcccacgatatgacttttttagttacagatggtggaatgaatcaccatctatctgcatcaggaaatttggggcaattaataagaagaaactatcctgcaatcattggtaataaaattaaaggagagaaacgtgaaacagtgaatatagttggtccactctgtactccactagatattcttgttcatcaaggagatatgtcagtagcaactccaggggatttagtggtaatttttcaatctggtgcttatggtttaagcgcaagtccaaataatttcctaagtcaaacaaatgcagtagaagtattagtttagtagttactaatatattctttagcaattgataaactgttggttaatgtagaaatatctcttttaaatttattacgtaattcttgggggggaacccccaaaattatacattggttatattttttaatattttcatgtaagaatatttagtgaagtaactaaagtatctatcttgaattttatttttaatagcttttaatgaatttattaatttaaaaatataaagcaacaagctatgctttgttattttactgattatgactccaaagaattataataatatttttcatggatttccattaagcatgaataaaaaatcaacacattggagtcatgactcaataagttagttaatagattgtcgcgatttaaaattactttttggtatacggataattatcaggtttacaagaaatcaccgcaggaaaagtctattcaaggaaagtttttacattatgcattgaacggaaaaatttgatacacagtaactgctccaactatctgaattataataccttggaatgttctataccctcccctatggatttcaagatgcatcgcgacggcaagggaatgaattcccttcccaaaggtttattgaaatctgagagagaaatagcaatataatcaataacacaatcatcatatccccgtaaaaacggggagcatttctacttcaactatcatcatgaaacctgaatctggtttatccccataaattcaaggaacactgccccccctatgtcaattacccttccggatgacggttgatccccgtagattacggggatcaaatgacaacaaatggagatagttctgtatttagcggtttacccccgtaaaaacggggaacaagtccatctctgccagctaaaacgctaactgttcggtttatccccgttaatacagggaacacgcttccaaacccaaaacacaacagtatcagttcggttcaccccgtgggcacaaggaacacaccaattactaccgactacatcactgttactgtccggtttatccccgtagaggtagggaacaccaaggaagccaatgatcagtgtcattttcgtacggtttatccccatgagtacaatacagggaacacatccttagctttataactatttggcgcactgctaggtccatccccgtaagtacagggaacatttagcgaacatagtaaagcatcactcatgccgtggtttatccccgcaaatacagggaacacttaaattctctctttgacaagatttatcgagtttggtttaccccggtaatgaccaggaacactcagtgacaccgatatcctaccattaattatagcggtttatcccattaaacacaggaaacatattcttccctgtacaaatgtataccaaaattcagggtcatccccacagaggtgaggaacacggtaattattttatcaatatttccaagagtaacaactacgccttactctacaggatgatattagttagcaatatcactttttaccatgcttttgaagcataacacgaacgcctaacaacagcgaatttgctacctttaacatcaatatcctcatacaacaaagaatattgcattacgatcttcaacaaaaataaatttaaatgacatccatgccattatactgttctgattaacatcaatccgcatcccatcgctttagcacgaccaaagccttttgcatactgttccaaatatagctcaccattggtaatcgtcagaagcccttgaaaatctacactggaaaattgtattttttgcccctgcttttttacacttcgatgctgagtataaccttcaatatccagtaaattgtcaaactgaataccccactgctgcatacgacgatggtttaacagccaattacgggcagcattctccatcatagcttttattttcccctgttccgtttcaccttgctgttttgcctgaaacttagcatgcatcaagacatcatgacgctgacgttttccagaaggatcagtaatacagatcgttggattaacgcgcaatttgaaagctaaacgctgcccctccttcaattgaggataaaatgctttcgtttccacctcaaacaatggtgactcagtttgaggcgaggttttagataaaacatagaatacaggtaatcccattattccgatctcttcccgaaatagaaattgccgtttttcgtctgttgaaaacaatttccataacaattgatgagaagtataaacgccatttgcactcaattttgctaatatatttgctgtttgactcgattgccgaagcacaattttagacaaatacatcaacaccctcctcgatagaaagttgatacatagtacgttgccggaattgccaacgcccccggttaatcggctcatcccaaggatgactgattaaaatatttgaagagataatttcatctttatttccctcccaaaaataagtcacaataccgtttgcacctagccataacttatcttcgctatcagaatgaatcagcggtggaaaagagatatccaatgccatttttaatgccgatgacgtaatgagtttagggctgagaggcaaagcaagcgggcaagatttacgtccaagatgcaagataaatacgggcttaagtaaagcatcccggaatcgttcaagcgtaaaacaagcgtgttcagttaatgtaatagcaacgatccaaataccatcacaacgataatcacgattagacagtatggtattaagtttatctgaccttaattcacttttacggttctgatgaaccacattattattgtgcgtcggcacctgcgtcgtatgataatcacgcattaaagagccgggaacggtctgcttaatggcaattaacacacttttttgtaattttgctaattcagactcattatctcgttgaatacctagcgctgcgcctaataaccccaaaatcgccgagcgaccaggatacaattccgttggcctttctcccccaaccgcaggttgtccccaacttgccatcgggccatataatcggaagactaaatatgctttcattttgcccccattactgtgcagcaaattcaagcagttcggccaaagttccttccccagtgaatgtgttgaatttatagcggtcatcggcacaagtaccgtaaaccagatcaatattgcgcatttggctttctaatgcattaattgccgatgagccctggtcgctgtcattaataggctttaaaaatgcaacagataaagaacgaggttgttgctcgcctttctcaatgagagcaaaactggcataagcacgagaagcaaaactattttgtttacccgcaggcgatactttcacagcggcttctgttaatgctttaatcgctttattagccagggcttcatcaccatccaaattttttattaattgcgttttattaatgcagatataactgtaaaacagcgcggcggcaaaacccaattcccctatatgggccgatcccgtatcttccttaccatcatttaaatcatccaccgctgtaaaataatcatcttcaataaccacactatgtacactaatagcatgagcgacctgacaggcagcctcgacgttaaatgccggacttgaagctaacatccgaccaaataaagcaatatccaccgcggtttgcttagtttttaataaattaagctcttcaggcgttggtgcccggttttcttccgccagcaccgcaatcaacgacataacagattgttgctcttccgggctgatatgcgccaattgttcaatttctaaagcatcttttttcgttttgccaaaaacaccagcaatagtcatagccaatgctctagccgatttttctttcactccagccttgatcaacgcttcaaataccttgatacccagtcgcttggtgcgaataccaatattctctgatagcacctgttcaaacaattcagaagtacgccagtgacgttttaaactttgagaactcacacgtaaacgttcaaaaccgcccattttcgctgtcttaggccggcctaaatcatcacgattcagattagatggcgcataggaagttaataggtgtaattgaataaactgactcataataatcatcctaaactcaattaatgaaaatccgataaatcaaccgatttaccactagcagcacggtaataatccataccccacctcactttgatacgcctatccgccttgcatggtcgtaattgctcatattcagcaaaccactcctcaatatcccgcgctaaagccaaaacagaaatattgcctttgatttgctgtaaaacccgacataatcgacgtaataattcattcggtgttttagcattttgtaattgtgaaaatcttaattcactgaccaccggtttatttcctcctcctttcttacccgccgctaccgccaatttgatatcactgttgtttttaacatgaactaatgccaccgccatcgtggcccaatattccaattttatcggattatccgacaaactaatttcatcaggtaagctgagccataaagcccgaaagccttcagttaacatagccatctcaacactgtcacagcgctttaactgagctctataagtagaaggggctggaataatacctttctcttttagctgttttggtgacataaacatactttgccaccaatgcaataatatgatttcactcttactgtccattacacctcctctttcccggagtgaatatgatgattagtgataaatgttttgatctcttttaacgctttttgtccatataacccgataattaactgctgacgcgctttcatacgtttcgctattgaacgctcatttcctaattcagataaagcaacatattcatcaaataaatctctacagagataacgcaaggtattgagccaatgtttggcctgttctggtgtcagaaacggcgcatcggaatttgcattatcgataagttgatgcaccacagaaaaaaatagcgattcactttgttgccaaaaagtcaggtcaataaaggaagtgtctcctttcacatcaacgggcttttcaaaccaagccgcttttatttgattccggcatagccaaatcatattgattgccagcttttgtagctctttgacttgatatagaatcttttcctgttgttcaaataagacaaaaaacaacggcacagtgacagaataccaacaacgtgctttcatattatccatatcgtagccaaacacccacagacgaggcattacccttcggagttcagcaaaatgacaacataaagagtaaaaatggcttacaaccggcgcacaacgctgtccactctcatggctggtaaagactaaagcatcccaaattttatatgtcacccctcccggttggcctttaatcgataagggtggtgttagttttttaggatcccatttatagggcgttaacggatggctccaattaccggtataattgccgccatagttttgtgcccgatattcagagacagtgaactcagaatatttacctgaaattttgcaaatattctcacccttttccactataagacgtatacgtctcggcattgcccaatacatatgtaagggatgcacatccgtagcatgaatttctgtcccttcattaacactcacttttgttggcgctaaccagggaaaaacctgagcactggttaaatcaggttctgaataatgccattcacttcgactaataacgtttaaccacagtttttgccataatgtggcatcggtttgttgcggcaccactaacgtggttaatggtcccccacctcgtaatccgactcgatgtcccacccctcctgacggtgcattaatttgtaaggtaaacagtgccaaagtcgccatttcaagagacatcacatctccgatgccacgtttaatgaaatgatccgtattcagtcttaaaccattcgctcccggtgcttcaattaacaatccagctacagtggttgattttactgtttgcagcggatcaaaatcctgcataaaaagaggccctataccggtaacattaaaagcatgtatcactttattaaaattttgttgtaataccttcttatcaggtgatgtttcatagagagcatgccattgatatttatcttccggcgcaaaaacggtttgtaataaaccaatggcaaattggcaagctgctccttgaaaatcagctcgcggtaaagcaaagtccataacatcatgatcacatatcgcattaatgggcagtactttttcactgccatcacgcaaccgaaagggcaaccacgggtcctgaactaagttcataacacctcctgcttttatctttcacaaaagcctattgttgaagaataagtaaaattcggatcttgatctggcaaccaaggttgcaaatatctaacttggtaatatctctgttgcaatgcattgagagcaggtattaattttgttggaattggggctaatttatccgcatacttatttctggataatttaatcgtactcagtgacactgaaaattcggctgaatttacccaaggtacaagttgtcctgaatccccttttttcaataataatacctcaacagtttcaatatcactgtagcgagcattaatatctgaatcatcctcataccaatgatcagcacttcgatcacaataaccatataattgccactgtaaccaataagacttagctttagctgcctgacttcgctcctcatcaattaattcattctcttgatactttaacacttccggtgcttgctcataagcatgaccataaaccgcatcaattaattggcgtgtttccgcaggcatacgtatagcacccagttttctcaatatgcgcatggttaaccacaaacgtacaggcgagcgataaacatattgtgtgttacgaaaattatggcttagccaatctgatccaggttgctcccgccattcaggcgcatggataaacaatatgggtgtaggacgtgaatctttaataccccatcgataaataccatcactatcgcgagtatggcgatgcaagcgcccggctcgctgaatgagatcatcaatagggcaaagatctgaaatcatgacatcggcatcagtatctaaactcgcctggaatatctgtgtggtaattaatgctttgccccgccgcaattcaccatgactatttttatcaaaaatagtcaatacatgatcttcaatctcttttcggtgttgcaatataaactggctatgaaataacagacaacgctcaggttcagtaagtaaacttcgcagtgtctgataagcctcaatagcatcatctactgtatttcgtatccaaacgacacattgcccttgtacaatggcggctaataccttttcaacacaactgccaacgctatttaagaaatcaactttgatttcccggctaacatcttttcggcttgataacggttgttcaataacgggcaatatggcatttaaacttattttggttgctaaaggaaaatcatttttttgcaataattgagaactcaacccgccaacatttagccaaatatccgttaaacgttgacgctgtttaaaggtcaatgttgctgtcaataaaacagctgaaccgccctgataaagatgcagcgctaataaattttccagtaaattaaacataaattcatcagccgcatgaacctcatcaacgattaatactttacgattaagcccaaataatcttaatgattgatagcgccttggtaatacagccaataaagcctgatcaatcgctccgattccggcaggcgctaacagtgcctgcttacgtgggtcagctaaccattgattacactgcgctgaagcagcgatatctgttttaccatcgtttctatctggatgacctaacgctaaaacgggttcatgaaattgattattcatcccccacgtaccatgagctaaaacgatatttggtttactgtcatcctctgtcaagagcatttgctggtaatgttgagcaatccggctaaatattgcattagaagacgctattgtaggcaaaccgaaataaaaaccatcagcggcttttgcctgcatcaaacgatgtgtaagagcaagcgccgcttctgttttacccgctccagtaacatcttctaaaataaatagctgaggagaatcatctacaggtattgattcggcccactgttgcaatggtgttgcagcaaaaccgtaatattcctgaatagaaataaacggcttgactaccggcggtctccctaaatttatcgccataaccgctttttttgccattgcttgagcatgtttccaataatctgttaacggcataggtttagattgatacgtaaaataatggctatcagaaccaatccaatccgccaatattgcaataccagcaaactgccagctcacttgttccagtcgccttcgccactctttggattgtaatttttcaatgggaaactcaggttgaaataattcaaccaaatgatgtgcaaagagggcggcagcattaaaattatgaggttcagtaaaatgtttaatcgctctatagcctgttttatcaattggccggccgtgatgtcctaatacacaatcaatgaataccattaaggtatcaaacatctctcgctgttctctgtgctcagcaccttcaatattaacgagtctattaagtaactctgctttgatattttcccagaaatacaaccctatacgatcatgacaaaaataacggccatcatactctttggggcaatctggtcgatgcagaccgactgccaaaccgggaagtaatttttgaaaagcagaggcaaatttaccaatatcgtgcaaagccaatataaaagagaccatgcttcgtaactgctgcgtagataacgctaaaaagctagcaagatctctagttaacgatctttctaaagagagtaactgcattcctaccgcagcaacatctaaacaatggtaaggaagtagatgataatcggcactatcaatctctaagactcgcttcgccttaccccagtattgaaaataaattggcatttccatctaaaatccttacttgaacatctcttttacctatttttagaacataatgcgaaaatttagatcataaaaatactagtttctgtttttttaggataattctgtataaaaactcactatctaaacagacgaatttttggcctatctctgagcattaagccagaattaaagtaacatcgtagtgccaaggaaccgtttgaccgggtagccaacctatactcatctatatgataaataaagataattacatgtaaggtccatacccgttttaccaaaggttcatttacactgataaccctgcgtatatgatgtcaggccaaggtaagatgaaagtactgatgggtgtttagcgatgtcaattacaattattccacaaatcgcttttaattcttatctgcataggtttaatccctaatgcggcggcataacaaaagagctaattaatcgcttatctaagataatgacgtaattaatccggaaattttttatgaccatgcagccattcaatagcgtcaatacaaagactatcggtgttttcgcttccatttttcaaattgcaaaggtcggagaccataccttgccaacacaccttcatgtaatcgccgtaattcctcaataactaatgcctttaacgtgtcacgttcagattgacttaattcatcagaaattaatttatctatcacgtcaattgaatccatctctggcgtggcaactacccgataaacgatctgcttaatcacatttcgatattgtaatcttaacggatctggtgtggttattccctgcgtgacagccaaatattctcgggcagaacgctcataagcccatagataaagatctcgtagtaattcaactcgggtcatttcataaataccaagcattgcacggctatatgcctcttccggtacatcgacaaaagttaacggacatagatttgaacgaatcaacggtaaattagctgccaggcgggaagttcgtttattgacatcagcaaaaggctgtaaatacggcaaatggatcatcataaaaaaggattgctcaaatggatctgatatagctcgtgctttcccgagcaacgaatccaaaatttcactgatatgggcctcacccgataaaggtctgaaaacactttttcctatttcaacttgatgttgacggatacgtccttcatagacaggattagataataaattttcagataatgtactgtgtaaattgagaacggtatatcgattaaaatcaagttcctcaataccatcgacaagtaattcaatagcggctttatggtttaggatcatttgagtttcaatcgcgttttttcctaccgcaatttttccatattcaatcaacttcaccgtatccaatcgactgtaagtgtttccttccaaataacttgaagcccacgataaatcaatgagcaaacgatccaagatagctctaccataggttcccgctggctgtgagatttgtttcgtatctccaattcgccaaagctgattacgaattggaaccgacagataataagtgacattcggctcatatgattccagaaactctcgctgataaccgacaggcgtcctcgctttgatgggttgatcaatataacgaagaatatcctggctatcttcagacagtggaatatagctcgggaaattatccgatctatccgctactgaatctgatgtttcctccgtagcgataacatagcggcgatttcgaccttcacccaatatctgtactttcttattttcaacaagtcgccccagccaacgttgaacagtccttctaggaacggagggatgctccaccaataaatccgaaacagacataggttgtgatgcaatacacaaagtttcataaatatcagtcattaaactcatggcgaacaacagatcccagtaagaacatggcgcgattatggcgcaattcagataatcgcgccacttttgtgccactaatatggcgcgattatggcgcaattaatgtgggcaatccatttgactgtagtgttgaacctgtttagctaaaaacaggacagatgaacatgacagcagcaatcttatttacggggtaggggtaggagcatcaacatccagcaaactttcaatagcgccgctacgtaaaaaacgttgcgtcttaggtatgacatggactttttcactcacaggaaaaacctcaatgcccgcacctaaaaataccggaatcgtggttaagaatatttgttgtaattcaccagcctcagcaaaatacgcagcggttttacctcccccaactaaccagacatctttaccattagccattttcttcgccttggcagcaataactcttactgtttcattggttatgatgatattcaacccttcaggcgttgacagcgccctatgagaaagaacgaaggccggaacatttttgtatggccaatcatccggtgaatttgtcattatccattcgtatgtttgtgctcccataatcacagcaccaatacctcgataaaaatcatcataaggtgttgcatcatccccaagcacaaattcatataaccaatccagcccattgtttttattagcaatataaccatctattgtcgtagcgacgtaataaattaatttcggcattattaccttcctattaaacacgatgttaaaacgctatatacccgttatccttcaagttgcctctttgttggctgtactctctcaccccggtcacatcgttatctatgctcccggggattcgctcccttgccgtcgcgatccatcttgaaatccatagggtatacacccagattgatgacagttaaaatattttcaaacctccgtcaaaaggtaacgcgtattttctaagaaattatactttataagatatatatcaccacacatatttacttccattacttcatattttcgccaacacaatacatgaaaaagtaaaacactaaagcatcgcttccatcccctaaaacgtaaatttcatcattcaatgccacttggtcacagatatgaaaaacccaagaaatcaaaataaaaagtaaaataaacaacttaaccaacaaaatataatatctattggcactttaatacttgatgatgaaatatagctcatccataaaagctaactttcatcatctataatattgttatagaagcgatattcaggaactttagcctcattaatcgtaccaattcttactggcaaatgaccatacgaatgacataataattttatataattccaatactccctctctgtttctatatgttctattagcggatcaaaagcaccatcataaaactcaacatttaattctctgtcattattacctccattaatattcccactattattttcttgttgaagaatacattctttattatccttttcgtgattcatatttccgcgatctataatttccaacatctcttttatcatttctaagctatgacaagctgtttgcggtgaattgtagaataagccatcattaaaaatagcttccatcaattcataaaacgcaaacgaggttgttccctgtatatatttgatatttctattatcatatataccaaaacatttatcattcaaaatatccgtattattatcatcatagccaattaatatttgcctgtcactggcaatgactggaatatttttaatttcatggatatattcactgatactgtaatgctctttatcgcctttcctataacccgatgccatacaaactgattcaatattaaaatattttgtcggcgtatgttcacgattaaaatattcagacagtttttcattatctttcatatcttttcgctgatatacccgatgaaccgacgtgattctctgaatgctgatccaatcaaatatcggttcttcttgagaaggctttctaatctctgcaatgtaagcagaaatatcaatttccaaccaagtgcttagcatagcctgccacggttctatcgcgagaaatatatttgatattgttactcctttttctattaggaccttatttctgaaatatttcaagaaaaagaacggatcatttttacctaactgttcctgaactgataacatcggcacagcgattgtcgtatcgtaatctgaacgaaatctcagaatcgaatcaacacaaataattaaagtaccttccattttattcctcgttcacttaagcttttaatatattaaccactgtaattatcgtatatataaccatctattatagctatatatctgaattttgctatttttgaatgtcaaatttattattccaactgcctacattacatcaatattaaaagataattgcatgatatattaggcactcatcaataaacccaacattatattactttatatccgtcatctttcaagttgcccctttgttggctgcactctctcaccccggtcacatagttatctatgctctcggggattcgctccctttccgtcgcgatgcatcttgaaatctattgggtatacccctaaatctaaaatgatttaaaattttcccttgtgaaaatatttttaatattaaattcaatttgaaactattaaaaaaaataactattcagatattctcaacaccttaaatactcggctaacagtaaaactcaatagaggatgaacaagagatcaaatcaattatacccgttatctttcaagttgcttctttgttggttgcactcgctcaccccggtcacatagttacctatgctcccggggattcactcctttgccgtcgcgatgcatcttgaaatccatagggtatagaccataaataataatcagtttctccattgatttaaccttaaaatatacgtcattaacgccttaatcgtcattttaatttccttgaagtactactcatattctatagcactataaaggaatgtttagtttaaattctcgatctctgtttaaaatccttataatttagccctgtcaatcatgatcaaaacgacaaattaattcattaattttatttatagtaaataaaaatgcatttgatcagcgggttcgtatccattatttattggtaacggaaagcaattacctgtaacataccaaaagtgataatgatttgcatttacattgatagcatagcatgaaaatgaccgttaatgttttagacactcaacagatccagtggatgtacgtccacaatcatgattggttatttcgttggcttaagcatcgccttaactgcgatgaaactgccgcagacctgactcaagatacttttgttaaattacttcgttcacctttaccacagcaacttaatgaaccccgtgcctacattgtcaccattgctaaggggttgatggttaactggtatcgtcgccgctcacttgaacagtcttatctggatttactcgtcagtctgcctgaaccgcttattcccgcaccagagcaaaaacttatcatcctcgaaacacttcaggaaattgatattatgctcagccaactccccacgccagtgcaaacggtctttttactttcccagatagaaggcatgaaatacgaagatattgcaaatcagatgaatatttcgctgtccacagtaaaacgttatatgaaacaaggcttttatcaatgcctgatagcgatggcataagagggcttggtatggcttcctctgatacatcgtctttatcaagtacaccttctgaaaagatacttgccgaagccgcagaatggttgaccattttacatgatagccatgccagcgaagctgatcggaatgcctgcgctgcctggtgtgcacaaagtccagaacatgctcaagcctgggaacacgcacagtgtctgttagcacggttacaccatttaccaccgcatatcgcctcacctctgttaaataacaaacagcccctttcccgtcgagaagccatcagaaagcttacacttatgttgttaataccggctggcgcatcatcactcttttggcgatctgatcaatttcagcttctcactggcgattatcacacccaaacggggcaaatccagcactggtcattaccggataacagccaactcactttaaatacacaaagctcaacagatgttcattatgatgatacccaacggcttattagtctaaagctaggggaaatctatattgaaacccataaagataaccgccatccagctcgcccatttaaagtacaaaccaaacaaggcgttattgtggcattgggcacaaaattcagcgtccgccaacaagcctcacacgctcaggtggaaatagtagaaggagcggttcgcattacgccagataacggtttaccacacatactgcatgctggagaagcaacccatttcactcaatttaccgttgccccacaacatacccgttcaataacatctctaagctggttacaaggcatgatggtagccgataacttgccgctggcaacggtggttactgaactgaatcgctatcgttccggcatcatccgttgcgatgatgcagtagctcatctgcgggtttctggtgcttttcccctacgggatacggatctggcactgcatatgctattacaaacctatccgctctcaatacgccgcctgacccgctattggattacactcacctcacccagttaataaaaataatcatttttactgacacttttttcaatctcatacggcatagaaataaaagaagctgaaaaagttatggagaacttactatgctatatcaaaaacttactatgccatatcctgttgactgccaagattcacaaccacgttggcagaaaaagtctttagtcgcactgttattaccattaatactgctaccgactcgttccctttacgccaccacaccagcagatacactctattccgttcatattccaccaggttcattaggcaattcgttgtcccactttgcggctcaaaccgggacagcgctctccttcgatccgaatttaaccaacggactcacagcaccttcattaaacggtagtttcagcgctcatcaaggtttagtacaactgctcacaggcagtcatttacaactgtcccaacgtaccgatggcagctacacgctagtaaaaatgacaaagaagatgaccaacaaaggtgtaatcgtactaaatcctcttacggtagctggcaatcgcgggtattcaggtaatgaaccattgcggttcggcagtaccaccatcaaaggcaaagatatcgaaaaattcggcgtgatccaccccgttgatattttcaaaatcacaccgggggtattatccggcgaagcgcgtagttcaggcagcctggatgtgaatatccgaggcttgcaaggacaaggccgagtcctaaccactgttgatggcgcatctaaccagaccgcgctttaccgcggctatcagggtgtctccaaccgttcctttatcgatcccgatttcattggccgggtagatatcagtaaaggcccgacaggaaaaggcggtatgggagctattgggggaacggtggagataaaaaccattgaagccagtgatatcctcctcgatggacaaaaggcaggagtgcgcctgaaaggaagtctgttgaacaaccattctaatcctgacgattatcaacgcaatgactggccttccccatcaaaaacctctcttttcgatgctaaaaatcgcaccgggagtattgttttcgcgattgccgaaccttcctatgaattgctgtttggtgtttctcagcgcaagcggggtaattaccactctggcaaacacggaccgggcgctaaggagcgtggcatgccaggctatttgtgtgagagtgatccacaagattgccgcattccacaattcagtgaacagatggccggttattcgctgtacgcaatgggagatgccgtacctaacacttccgaagatagccagtcattactgggtaaaggaaaagttcgttttggcgatggtcatgaaatctcggctatcattagccattaccaaaatctctacggggaatcctatgtcgcggatatggcaaacctgagccaaacatttatgatcttggaacaggggccactgacacggctcaacatgaacaggcacagcctcaactataaatgggaacctgcgtcaaatccctggattaatttggatatcggagtatggcaaacacgggttaacgatcgccctcgaaccgcaaataataccctcggtgataaaaaattcatgcgcacagtcggggtgaatttgagcaacacctcattatttgatctttcaatgcaagatattgagttgaactacggtgccagctttattcgtgaacgcactggcccaagcgcaggtaaatggaaatatgccgttaatcgggaaggagaacgtaaagaaggccattttttcctgagcgggaactatatgcttgccgaccgcctgaccctaatgggcggatgggattacaaatcctatcagatcgaagatgacagtccagctcgtccgggtagctcttggttaccacaactcacttctgggaaagtcaacaataagcgagaccatgctcatggctattgggtaggcactaagcttgaacttaatcatgaaacagcactgcatgccaaatatgcctacgccccacgttttccatcaatggttgaaggtattcgtggctacatgatgaatgtagacgatcatataaaacctgaaatttcaaaaaatatcgaagtcgggctgacatcacgcttcccggatatcattgctcaaaatgatagcttcgatatcgcaatatcctactttgataaccgggtgaaggactatatcagccggtcatggatggatgattactggagtatgtacatcagtaatattaaagaggctaaatttgccggattggaattggcaagtgtttaccatagcgatcactttgatgcgcgtttatcgatgaattactacacaaaagtcaaattctgtacggaaaatgacgggtgcatcgcacgtagtctcccttcggattatgcaactaatcatattccgcctaaatatgcggtatcactcgatctgacacagcgatttttaaatgacaatgtatctgtcaacgccagagtttcccattatggacaaagatctgtaccagcaggaaaaccaagacgcggttctgctcctctgttggcacccattatttggcggcctgcaactgtagccgatatctctctgactgcccgtataaataagcatgtcgaatttgagctcggtgtggataatgtgttcgacaaatattatatccaacctcttagcctcggctatatcccttcaccgggcagaacgtttcgtgccggtatcacaacttatttttaaattcattcgttaagctggtggcatatccatgatatgccactttctggtaaaagggcgaggatgaaagcgatataaattattttcccttatttttctggaattaatgcaactttcaaaatatatttaaaatagaaattaaatgaaactttaaaataatgaaatagtttacatgtaattaattgtttttaaatgattgtatgtaaaaatatatatcagcctatagagatttataatatacaatcataccttatcgataacttaatttcataaattaatttcataaattaatttcaaataaaataaataacttttcataattataatacactcactctttttattctctgctattcctgtagggacatgaatttaaaaacgttttcactttctcaagcaattgccacatatactgacagccatgatttcgtgtcaccgtttcatgtaaggattgccacagacgctcaattttattcagccagggtgaataaacaggtaaaaacaacagattaaatttaggatgacaagccagccaatctctgacccgtcggcttttatggatactgtaattatccaaaatcaaagtgagggtttcagcatgacaatactggcgttcaagttcttccaatacattgataaataactgagaattcttatttaacccgtcagcataagtcacttttcccgtttgaacattcaggcaacctgcaaaataatgtttttggttttttcctggtgtcactatacgtttctgttgcccttttaaataccagtcagccccgatttttggattcagctcgatgtcgacttcatcttcataaaaaacgggatgtttttctgaacacgttgacaatgcctcggtaattttcgccattttttcatggtactcgggatcgggtaatttaagcgtcggggctgcccttcgccacacgatacccattttatgtaagtaacgatagaaggtactgatggataattttatgtttaataattcattgattttaattataaaaaactcaagactccagcgagaacgcaggcagcccaattgctggggagaatattgcaataaaaaagacagtaaaggataaagcgggattaaattccagacagcgggtctgcccacaggcaggcttttgagtccttccagaccatataaagtcaaccagtttatccagcgatagacagaagaacgactggcgcaaagggttttggcgaccagagagacagactcgcctcgatgcagcatcaatatggccatgagcctgcgagcataatctttatctcgggtgttctggataatttttttcatctggcgtcgttcattgcggggtataggtgctatgataggcataactcagtccgtttagtggtttgggattatctacaattgatcagattgcaaaaattggactgagttccctccaagtgttctactattttgaaaagttatttattagccattattttttaagaaaaataagaacataaatgaaaagattaattttaaagaattaagacattaattattaaatgactttttggttaatctaaaaaattatttttaacgaggatatatatatgaaaaaagaaccgattaaaacatcaaatccagataataccgaatcatctgatgcaaatgaggttgaaatcgaaaaccctaccatcgcggcgtctggcattgtctcagtggcgaacacctctgatggtcggatcgaggttttcggtgtaggtggcgataatgcagtgtggcgcaatgggcaaacgacacatacaggcgcttcctggaccggctggagctcactcggtggaagtgtgaccagcaaacccgccgcttatctcaattcagacggtcgattagaagtattcgtacgtggctcagataacgcgttatggcataactggcaaaccacacccaacgctagttggtcaggctggcaatctttaggcggagcgctcaccagtaaccctgcggtatatatcaacgccgatggtcggcttgaggtcttcgcccgcggcctcgataatacactctggcacatttggcaaaccgctccccactctaatccgtggtcaagctggtattctctgggccacgtgatcaccagtaacccagccgtccatatcaatgccgatggtcggcttgaagtctttgcccgcggggccgataacgcactttggcacatctggcaaaccgctccccattccggttattggtcaggctggcactctttgggtggcgttctctccagtgacccagtggtagcccgcactgtcgatggccgactagaggtttttgtgcgtgctgtcgataatgcactctggcatatctggcaaacggcccccaattctagtcagtggtctaattgggcctcattgggtggtactatcaccagcgcaccagcggtaataaaatacttcgacaatcggcttgtcgtctttgcacgtgccatcgataacgcactctggcacatctggcaaaatgatacccattccggttcatggtccaactggggctcattgggtggtggactttccagcggcccagatgtcgtggaaaacgctaatggctatattgaagtctttgtacgcgccaccgataacgcactctggaacatcaagaggacgagtccatcatcatggtcctcttgggcctccctagggggaacattaatcgacgcctcagcaatcaaataatctgaaaggagccaaattcgaacaacatatacgtaattttctggcccggtgcattagagaaagcattcactactctgcatcaggccagcaatacttcaattttctggtgttatcccaatattcgatatgtaaacctgacattctcgtattttattaacgataaacatatagttttatccatctgaaatagacttttaattgaattatctagaaagtaatctctaacaaagtaaccgcttggttatcagataattataataaaactagaacaattatgataaaaatacattttaaaataggaaaacatttcatctataatttattatttttgaataaatgcatgtgaatatataaacacaggtagttttataatgtaatatcatatttatttgacactttcctgttcataaaccagtatcaaatagaacattcattatttctctaaaaataaaagtgagaatattaattcacagaattaaatatctcacttattaaataactatttagtgagcaaaagaaattatttctaacgaggatacatatatgcaacaagaatctattaatacatcaaatccagataataccgaatcatatgttaaaaaagatgaggtagaaatcgagagcactgcaaccgggttgtctgaaattgtctcagtggcaaacacctccgacggtcgactcgaagttttcggtgtaggttctgaccatgctgtgtggcacaattggcaattaacaccatactcaaactctccctggtccggctggctctcacttaatggcaacgtgaccagcaaacccgccgtttatgtcaatacagacgatcgattggaagtattcgtccgtggctccgataatgcgttatggcataactggcagattgctcccaatctcggttggtcaggctggcaatctttagggggttcaattgctagtaacccagcggtctatgtcaacaccgatggtcgactcgaagtctttgtacgtggctccgataatgcactttggcacctctctcaaactgccgctcattccaatccgtggtcaagctggcaatctttgaatggcaacatcatcggcaacccagccgtccatatcaactccgacggtcggcttgaagtctttgtacgtggctccgataacgcactttggcacatctctcaaaccgcccctgattccaacctgtggtcaaattgggagtcactcaacggctcaattagtagcgaccctgcggttattggcaccgttgatggtcgactggaagtctttgtgcgtggttccgataacgcactttggcacaattggcaaactgttccccattccggtccgtggtcaggctgggtctcgttgaacggcaatatcatcagcgcaccaactgtagcgaggaattgggacaaccggctagaagtctttgtatgcggtgccgataacgcactctggcacatctggcaaactgtttctcattccggcccgtggtcgagctgggcctcattgaacggcaatatcatcagcgcaccaactgtggcgcaagacgccgatggcctgctggaagtttttgtacttggctccgatcatgcactctggaatatcaggcaaaccacatcaccatcgtggtccccttggttatcccttaatggctccttaatcagcacttgagcaatcaaataatctagcttcgcacaaagcgagcacaactttccggcctgatgcattagagaaaacattcactactctgcatcaggccagtattacctaatgtgctggaattaatccaatagccagatgacgaattttgtactttaataacgatcatcagatattttgaataaaaaaacaaatataaccgtaaaaaaacagacttaaaatagaaagcaaagaaaactttaaaataagaaaacagtttatatataattaatgttttttagatgttcgtatttgaaaatacatatccaaaacatagacatccataatataaaattaaacccaataaattaataattaaagtttaacacaaaataaaatatcatttattcattttatgaataaaaatacacagaatgcaatcggaagtattaatgtgaaattaaatacactgtttattaaatgactatttagtgagtctaaaaaatgatacctaaagaggatatatattatgaaaaaagaatctattaatacatcagggccagataataccaaatcatctatttcagacgaaatagaaatatccaatgaaatctcttggaccgcgttatccggcgttatctcggcggcaaataacgccgatggtcggcttgaggttttcggtgtaggcaccaacaatgctgtgtggcacaactggcaaacggtacctaataccggatcttcctggtctggctggcactcactgaatgaaggagcgaccagcaaacccgccgttcacattaactcagacggcagattggaagtattcgtacgtggcacagataatgcgttatggcataactggcagaccgtccccggtgctggttggtcaggctggcaatctttaggtggtcagatcaccagcaatccagtggtatatatcaactccgatggccgacttgaggtctttgcacgcggtgccgataatgctctctggcacatctggcaaaccgctccccatgccggtccgtggtctaattggcagtcactaaatggcgtgctcaccagtgatccaacagtatatgttaacgccagtggtcggcctgaggtctttgcacgcagcaacgattactctctctggtacatcaagcaaacggcttctcatacctatccttggacaaactggcagtcactgagtggtgtgataacgagcaatccagtggtgatcagcaactctgatggtcgacttgaggtctttgcacgcggctccgataatgctctctggcacatctggcaggtcgctcctaatgcaggttggacaaactggcggtcactgtctggtatcatcaccagcgacccggctgtgcatatcaacgccgacggtcggcttgaggtctttgcgcgcggccccgataacgctctctggcatatctggcagacggcaacatcggatgcatggtctgaatggacctctttgtctggtgtgattaccagcgctcccacagtggcgaagaattctgacggctggcttgaagtttttgcacgcggtgcgaataacgcactctgtcatattcagcaaactacatcatcgtggtccacttggacctcccttggcggtaacttaatcgacgcctcagcgataaaataatctggaggaaaccagattctgcgtcattttctggcctgatgcattagagaaaacattcactaccccgcatcaggccagtattacctaatttgctggtgttatcccaatattcgacacacaagccgggtattcactcaagttcattcccgttatttatgataaaaatatatttttcaaatataagtaaaaggaaaccttaaaacagggaaataatttatttataatttattatttttgaatggctgtatgtaaaaatatatataaacacacgagattttataatgtagcatcacatccacttaatacttcacggaccattaatcagcatcaaataaaacattaatgatttcttcaaaaaataaagagaaaaagtgagaatattaatttaaagaattaaacatctcgcttattaaatgactatttagtgaatctgcaaaattatttctaacgaggatatatatgcaagaagaacctactaatataccaaggccagataatgccgagctacttgttgcaagtgaagtagcaatcgaaaacgcggcaatcgccttgtctgaaattgtttcagtggtaaacacctccgatggtcggatcgaagttttcggtgtgggcactgacaatgccgtgtggcacaacagacaaacagcaccacactcaggctcttcctggaccggctggatctcacttaatggaaaggtaaccagcaaacctgtcgtttatatcaatacagacggtcggctagaggtattcgcacgtggcaccgataatgcgctctggcatatctggcaaaccgccaccaatgctggttggtcaaactggcaatctttagggggtacaattactagtaaccccgcggtatatgtcaacaccgatggtcggatcgacgtctttgcacgtggcaccgataatgcactttggcacatctcacaaactgctgctcattccggtccgtggtctagctggcaatctttgaacggcgtgatcaccagcaacccggcggttcatatcaactccgacggccggcttgaggtctttgcgcgtggtacggataatgcactttggcacatctggcaaaccgctcctgattccaatcagtggtcaggttgggactcactcggtggtgtcatcactagcgatcctgtcgtcatcggcaccgctgacggtcggcttgaagtctttgcgcgcggttccaataacgcactctaccacatctggcaaaccgttccccatggcggcccgtggtccaactgggcttcgttgaatggcgtgattaccagtgctcctgcggtggtgaagaattccgatggtcggcttgaagttttcgcacgcggcaccaataatgcgctctaccacatctggcaaacagtttcccattccggtccgtggtctaactgggccacgttaaatggaacgatcaccagcgcgccaacggcagtggaagacgccgatggtcggcttgaagtttttgcgcgtggcaccgataacgcactctggaacatctggcaagccacaccatcgtggtccgcttgggtgtctctcaaaggcagcttaatcgacgcttcagcaatcaaataatctggaatgaatccagctttgcacaagacgaacgtcaccttctggcccgatacgctaaagaaaatattcactgcgctttatcgggccagtggcacttaatttgccggtaaaaatctgatattcgatacacaaacctggcatcaattcgaattagcatattagttgataacaaggacatatttttgtctatttgaaacagacgattagtcgaatattcctggaaaacaactgcaaacagaataacctcttttaggtacatgattaaatcaggttctgcgtttctcaatagccagattatgaattatgtgctttaataattattcaataaaatattttaaaaaaataaaaaaacattaaacaaatatatttaaaatagaaaccagcggggactttaaaatgaaaaacagtttgtgaaaaattaattccacttaaataatttcgtataaaaaaatatataaaaacatgtaatcacataataagagactatatttaattaacattttacaggtcaataattaacaaaacaaaaacatccaccgtttatttcattaataaatgaacataggagactagtgaaaacatcaatatataaatacgaatacctctctcatcaaatgattattttctgaatcctaaaaattatttttaaagagaatatacatatgaaaaaagaacctattaaaatgccaaatccagataataccgaagcatatgttgcaggtgaggtagcaatcgagaactctgcgatagcgttatctggaattgtctcagtagcaaacaatgccgataatcgacttgaggttttcggtgtaagcactgacagcgcagtgtggcacaattggcaaacagcaccgctcccaaactcctcttgggccggctggaacaagtttaacggagtagtaaccagcaaacccgccgttcatcgtaattcagacggtcgattggaagtattcgtgcgtagtacggataatgcactctggcacaactggcagaccgccgctgataccaatacctggtcaagctggcagccactgtatggaggtataaccagcaaccctgaggtatgtctcaactctgacggccgacttgaggtctttgctcgcggcacggataacgcgctatggcacatctggcaaaccgcagcccataccaattcgtggtcaaactggaaatctctgggtggcacgctcaccagtaacccggctgcacatatcaacgccgatggtcggattgaagtctttgctcgcggtgccgataatgccctttggcacatttggcaaacggctgctcacactgatcaatggtcaaattggcagtcactgaaaagtgtaatcactagcgacccagtggtcatcggcaactgcgatggtcggctcgaagtctttgctcgcggtgctgataacacactccgacacatttcacagatcggctctgattccgtttcatggtcaaactggcaatgcttggatggtgtgatcactagcgccccagcggcggtgaagaatatctctggccggcttgaggtctttgctcgcggcgctgataacacgctctggcgcacctggcaaacttcccaaaacggcccgtggtctaactggagctcatttaccggcattattgccagtgccccaacggtagcgaagaattcagacggccggattgaggtctttgtgcttggccttgataaggcactctggcatctctggcaaactacttcatcaaccacatcatcgtggaccacctgggctcttatcggtggtatcaccttgatcgacgcttctgtgatcaaataatctggaaggagccagcttcgcacaagacaaacgtaatcttctggcccgatgcattaaagaaaatattcactgctctgcatcgggccagtggtgcttaatttgctggagttaacccaatattcgacatgtaagctcaatacgggttcaaactcatgtattattgttcatgacaaagatatacttttgattgaatatacccgtcatctttcaagttgcctctttgttggctgcactcactcaccccggtcacatagttatctatgctcccggggattcgctcccttgccgtcgcgatccaccttgaaatccatagggtataatttgccggtaaaaatctcatattcgatacacaaacctggcatcgattcgaattagcatattatcgttgatgacaaggagatatttttgtctatctgaaacaaacttttagtcgaatatgcctggaaaataacttcaaacagaataacttcttttaggtacatgattaaatcaggatctacttttctcaatagccagattatgaattgcgtgctttaataatgactcaatcaaatattttaaacaaaattaaaaaaacatgaaaaaaaatatatttaaaatagaaaacagcgggggttttaaaatgaaaaatagtttattcaaattgatcccacttaaataatttcgtgtaaaacaacatataataatatgtaatcacataatacgagactatatttaattaacccaaattctggataagaaattgacatgaaacctattccaggagcaatgttttggtgcacgccgaaacagctccggggaggaacaggctatggataaattaatagaaattttctgcgatgtcgacgattttccagtgatgacttgaacagaattcgggttaattaggatcagttacttaggacagcccctaaacttatatgcacgaaaaacagcttaaaaaaagcgctacctgacttaattagaacatataaataaagtacaaaggtaacgcttaaattatacttactattctctcgaataaatatttgaaagtttttctaatcaattatgggttattcacaacatcaatgttctttttctcatcatgtgtggcaaaagcactataaacgtcttcatttatatcacaggccaatgaaataaagttcaacaatgattctgaatatcctttagcggctttttcaaagatcacctcatataaagaagtttccagacctgagttatacatagattgctctaatgaaacatatacctgtcatctttcaagttgcttctttgttggctgcactcactcaccccagtcacatagttacctatgctcccggggattcgctcccttgccgtcgcgatgcatcttgaaatctattgggtatatacaccttggaataatcatattgaatttgaatcaggaatagatagagtttttatcattataattaacctcatcgtttatgaaaatttcgcttaatgggatttccatttttatcaaaatatcgactgggccaaataactaaaggatctattccgagcttgtccgcaataatcttttctcctttaggccatgggcgaattaatgcatttgataacgtcgatgaattcagtcccgattcccgtgataatgcggcaagtgttgtgccacgtttacgcaattcagcaataatatctgctgggtgccagtcgttttgagttgttatcatatcagcttacttctcccgttgatttatgatagtgattcaaactggctccatgaaccagtgttcatttccggtgaacaaaaccttttccaccagaaccgttattaataagggtgatcacagacacacgggcaaaaaatttcttaccaatgtctatgaactcagaaccatatacaatttgaacgcgtaaccaattgaacactcatttatgagtttggaaacttattcattgtaatagcgtcgggttgaataatggttttagaaactctctcaggttcatccaaaaaattagtaatcaaagcaccgaaaaaataaagcgtagcaacgatgcaagtgacgccacttgatcccaggctatttataaataaaccaacaatggcagggccaatcaccacagataaacccgtccctaaattcagtactgacatgacagcccctttgtctttttctaccatattagcggacatcgcatccaatgggatataacctgcgacacccgctccccagcaaatcccacatatgagtactatggcataatttgctccaacaaattgtggtgcaaaaaacagaagcaatgaagcaacgccagtcaggaccccgccacaccaaataatcgtccttttataacctattttgtctcctgctataccccagaccaaattaaatagaatattactcgtaaaagcagttccccaaatgcttagccactgagttgtagtaaacccctgagaaatcatatataccggtaaataaacaggaaacgcgtattgagaaagtgaatttatgattcgaaggatacaagaaataaatagttttggatgttccttaagaatagttattcccttcaaaacctcctttatatttccaagagtattattgttactttgaggtttaatgttatcgcgattgagaactagagcaaaaaaagctccaacaataataaatatcagtgttgtccataacgtattaatatgacctaattcttctactgcccaactcgcataaaaagtagctaatacttgcattccacctgaaaaaacaaagtaaaaccatccatatgctgtactgagtttaacaacagaacttctataggcaatccacactgaaaatgagtaggcaaatagcggatatccgaaacctttaatggcttgcgctatcaacaaaagtggatatgatatttcttttaagcctaggctgacgaaacctgtggtgccaacaacacaaaaaattgtgcctaatagcatggttcgtttagccccaaatgcctcaaaaaatacgccagcaaaccaagaagatatagctacacttataccataaatactaaatagtgtggaaatgtcctggatacttaatccattatctaccagataagggcttagccagcctatttctattccattaccaatcataaatgccaaaatacccaaatatccccatgataatgtgctgggtatacccattcgttctaaaaaaccactcgtattctgtttcatttcaaaccttacaattaaatattttttcagaattcaaaatttttaaatatttagcttagttttacttcactatcagacagacgttatattgcaagcatcttttcaatttttataatctattgtgtattatgggaaatagtttaaggttattttctcgatctattaagatctggagaaaatagttttttatattcttcatttttattctgtatcattcagcgtcatatctgtcgctatatacccgttatccttcaagttgcctctttgttggctgcactcactcaccccggtcacatagttatctatgctcccggggattcgctcccttgccgccgcgatgcatcttgaaatccatagggtatataccccggactgatggtatttaggaccaatttcaaaaaatggtttgctgatttcaaaaacacgtttcacaaaatcccctaattcaacattttctttaaaaatattgcagtctcgggcaatgttttaggtggatctccacaggtactacattccaaattgagaaaaccattatatccaacctcttttaacgcattaaaacctgcctgccagtcaatggttccatggccaggaagcagacggttattgtcacctaaatggacatgtttaatagcgtctccagcatatttaatgctttctgaaatgtttgattcttctattgacatgtggaagaaatcagctaaaacccctgtgttttccctatctaacgtatcaataatatccgtacattctttgatgctgttcaaataagggctttcataccgattaatcccttccaacagcatttttcctgttgttcccatgagagaagcggtaacctctttgtacatttcaagaaactcttatttttcagtctctgtcattttcttatagggatgaaacaacagcagaggattctgtgtgccgtatgtaaattccagctcagtgaccgcgccaatttcaccactgatttcggccactcgcttatacatttctcgtctcggctcttttttctgagatcgatattgtcactcattaaatgtccgtaaatctcatcggtaaaggcaaattcacacggaataatgcccgtgttttcccttaaattcagaatttcttcatgtaactcttcgttccattggcaataattcataaatagcgcaatgccaccgtaaccccatttgtacaacagggtggcctgttcagttaaattattccccggcaacattaggttcgaacacgatattttcatcataaaagccatttcaaacggcacaagataccgttcaatcttaaaggcgataaagaatatgctgttgtggtttactctgaattccgaactctattgaatgacaggctaaagttcaggttaataataacaaactcacaacagcatccctgatgatcagtcaggggattatcgctctgtaaaagtgataatcaagatatacccgttatctttcaagttgcctctttgttggctgcactcactcaccccggtcacatagttacctatgctcccggggattcgctcccttgccgtcgcgatgcatcttgaaatccatagggtatataaggttaattatcctttttctaatttgagcttcaccaaacgtacatatattttcacatcagtttttccatattacgacgcacttgaacaatcgaatcctgcttttgttgatcctcgccaactaaatacatttccccaggaagaaaacaccagaccgttctcttatccagaatttgggttaattaaatatagtctcgtattatgtgattacatattattatatgttgttttacacgaaattatttaagtgggatcaatttgaaataaactatttttcattttaaaccccccgctgttttctattttaaatacatttttcatgttttttaattttgtttaaaatatttgattgagtcattattaaagcacacaattcataatctggctattgagaaaagtagatcctgatttaatcatgtacctaaaagaagttattctgtttgaagttattttccaggtatattcaactaaaagtctgtttcagatagacaaaaatatctccttgtcatcaacgataatatgctaattcgaatcgatgccaggtttgtatatcgaatatgagatttttaccggcaaacggggaaaatcacgtacaaacaaattaatcgccgtcccacctttcaatgcacaacagctctctgtcgccactacaggcagtacactcattaacaacactacttgtcggtaatatggagaatatttatccatgaaataatccattattcaaatacttttccggaaccgtaatctgatactgtttatccaactttccccctaacacgacttgacgcttccctgctcctaaagcaattttagttttatcaatgcgcttagcccattcgtgggaataatagtcggtcaaaaaaagatataaacgattagtttggatcgcatgactggaatgaaggagtatttctactttgcgcgggctaaggttaaccaaaccttggaaaagttccgcagcatgttcaaaagaaaacgatacgggcacagtatctaaaacttcataagccgctaattcaggtatactggcttttagctggtttccttacaatttaaccagaccaaaattacaactaaatttgcgaattgcttccagattttacttgtgtaagtttaaagcttggtgcgataccataacgaaagaattgattcacaaacttaactaagactactgcatgattaatacagaaaccttcgacacccacacgcccatgatgcagcaatatctccgtcttaaagcacagcatcctgatatcctgctgttttacagaatgggggatttctatgagctattttatgacgatgccaaaaaggctgcaaaattgctggatatttccctgaccaaacgaggtcaatccgctggcaatcctatccctatggcaggcgtgccacatcatgcagtagaaaactatttagctaagctggttcaattaggtgaatcagtcgctatctgtgagcaaattggcgatcctgccaccagcaaaggcccggttgaacgtaaagtcgttcgcatcgttactcccggtaccgtgacagatgaagcgctattacaggaacggcaagataatctgctggcggctatttggcacgataatcaaggctttggttatgccacactggatgtgacatctggccgcttccaaatatctgaaatgatagagctggaaacgatagccgctgaattgcaacgtagccgtcctgttgaattactctatcctgaaagttttgagcatatggcgctaattgaaaattttcatggcctgcgccgtcgccctttatgggaatttgagctagataccgcaaaacagcaattgaacctgcaatttggtacccgtgatctcgtcggttttggtgtggataaagcaactctcgctctgcgtgccgcgggttgcctgttgcaatacgtcaaagatactcaacgcacggcgctgccacatatccgtggtattacgatggagcgtcagcaagatacagttattatggatgccgcaacccgtcgtaatctggaactgacacaaaacctgtctggcagtacagataatactctcgcttctgttcttgatctgtgtgttaccccaatgggtagccgaatgttgaaacgttggttgcatgcgcctgtcagggaccgccagatattagaaaatcgtcaacaagctattgctaccttgcaggaaattgggctggagttgcagccatttttgctacagataggtgatcttgaacgtgtgctagcacgcttggctctacgttctgctcgtccaagggatctggcaagaatgcgccatgcattccagcaattaccggatatccatcaagttatggactcctcagattccccttatatcaagcaattgcagaaaaatatcggcaggtttgatgaattacaggaattgcttgaaaaagcgattgtagaaacacctccggtattaattcgggatggtggcgtaatcgcaccgggttataacagtgagctggatgagtggcgcacactggctgatggtgccagtaactatctggaacaactggaaatccgcgaacgagaaaagctgggccttgatactctaaaagtcggctttaatggtgttcatggctactatattcaagtcagccgagggcagagccatctggtgccaattcactatgtccgccgccagacactgaaaaatgctgagcgttatatcatccccgagttaaaagaatatgaagataaggttctgacctctaaagggaaatctctggcaatagagaaagcgctttacgaagaattattcgatctactgctgcctcatttggccgaattacaaaccagtgccgaagcactggctgaacttgatgtattggcaaatctggcagaacgcgctgaaaccctgaattatatttgcccaacattgagtgataaaccgggaattcaaatcactggtggtcgtcatccggttgttgagcaagttctgcgtgaaccatttatctcaaacccactctctttatcttcacagcggcgtctgctaattattaccggtccaaacatgggcggtaaaagtacctatatgcgtcaggcggcacttattacacttctggcctatatcggtagctttgtaccggctgaaaaagcagtcatcggcccagttgatcgtatatttacccgtgtaggtgcctccgatgatctggcatccggccgttcaaccttcatggtggaaatgaccgaaaccgccaatatcttgcacaatgcgacagaacaaagtttggtattgatggatgagattggccgaggcacatcaacctacgatggcctttctctggcatgggcatgtgcagaaaatctggcaaaccgcattaaagcaatgaccttgtttgccactcactattttgaactgaccacgttgccggaaaaacttgaaggcgtggtcaatattcatctggatgcggtagagcatggagataccatcgcatttatgcacagcgtacaagagggtgcagccagtaagagttacgggttggcagttgcttccctcgccggcgttccacgtgaagtgattaaacgggcgcgccagaaacttaaagagctggaatcgctatccaaccatgcaacggcaagtcatgtcgatacaccgcagcttgcgctattaacagaggaaacatcaccggcggttgaagcattagaaaatcttaatccagattcactgactccgcgtcaagcattagaatggatttatcgactaaaagatatggtgtaagaacgtgtttgacaaaaaccttttacaaccgatataccattttttgcaatgtgaaaccccgaatttgtgggtagataaagcaaagcagcctgaaaatttacctgtgcttctacgggatcatctattatgcgaactgaaagcagcacagagcgctatgtttttgatccgaaagtatgcagtagatcagcgaagtgaggatacacttctggcatggtttaaaccttatgaagattttgcttacaagaaaattggcgatctcaattcactaagaggtcaaaaccaagcgaccaaacagatcaccgccaaagctaattcactctatagccaggatctgattgataaaatggtattgctgattaaagaagagttacatcacttctatcaagtgctagaaatcatggacgcacgcgatatcaactatgaaagcattactgccagccgttatgctaaaggcatgcttaaccatatcatcaaccatgaaccttatacattggtcgataaactgattatcggcgcttatattgaggcgcgttcttgtgaacgcttcgccaaattggcccctcatttggatgaagatctgagtaaattttatatctcgctgctgcgctctgaagcacgtcactaccaagactatctttcactagcgcaatctattgctaatgaagatattaccgaacgggtaaactattttggccgtgttgaagctgaattgattcaaaatccagatagcgattttaaatttcacagtggcattcctgtaatttgaactgaatgtagattgattaacaaaagaaaggtgagcttatactcacctttcaaatcgatgacaaacctcgttcaaaataacgaggtttatttttccttttaaaaatgttcagaccccttttccccattaggttaatttgattaaccacgaatgcgctattgtgagccataaaaataaccagacttaaatggtgagttttttattaatttattctatccaattgtactgataacgatacatgccattttaatactactatacccgtcatctttcaagttgcctctttgttggctgcactcgctcaccccggtcacatagttacctatgctcccggggattcgttcccttgccgtcgcgaagcatcttgaaatccatagggtatatatgaaatataaaataatttcatatcgataaaaatgtatatacccgtaatcattgaagatgcttgattttatccgaaatggagatcattatcctcgctatgaaaatattcattaccgatgaacaaaaagccgaacttgaacatctccatcacacctgccgtgataagagggagtgtgatcgcatcaaagcggtcctgctggcctctgaaggctggagttcagtgatgatcgctcaggccctgcgtcttcatgaaatgaccgttaaccgtcatatcagcgattaccttaatcaaggtaaacttaaatctgataatggggggtctgatagtttgctttctcaagaacaaactgattttttaatcaatcacttatctcaacatcttttccatcacacccatgaaatcgtggcctatgttgctcagctctggaatattacctttagcattcccggcatgaataaatggctacaccgtcagggtttttcttataaaaaaccttgtggcgtccctcataaattcgacgcagaaaaacagcgacaatttattgaatattatgagaatcttaaagtcacagcgaaagacgaacccatcctttttcttgatgctgttcacccgactcaaggcaccaaactcggttatggctggatgcgaaaaggcgagaaaaaaacagtaaaaacaacaggaagccggactcgcctgaatatattgggcgcgctcaacctgaatgccattggtcgtacggtgttccaggaatatcaaaccatcaatgactacaacatttgctgttttttcaatgaaataagaaagtcttatcctgactatcatcaaaaaattcatcttattgtggatggggcgggttacaacaaagctcatcttgttaaggagtgggcttatgttagcaatattgagttacattaccttcctccctatagcccaaatttaaacccaatagagcgattatggaaggtcatgaatgaacaggttcgaaataaccgttattttgcggataaacatgaatttcgagacaacgtcttcaaatttttcaccacaacgctaccggatatagcggactcgctgatgtctagaattaacgaccattttcaggtgctaaaaactgcatcttgaagtttcttgggtatatgataataaaatcaagccactaattgataaacaatagcagatatttactgtcgtgcatttaatgcacgacataatataggaactcagatagatttaaaaaaaagtaaagtagcaacggagaaaaaatatcaactaaaataaaaacaataatacttgccaccgatgaaattagtgttttttttacgtttttatctaaaataaaaaaataactaaccgttaaaaataatagaaaaaaaacaatggtatcaatgattcgtgataacaaaaatatcattccgcatcctttattgaaaaatttttctttagattatacagtcaattttattaaaactattaagtttgcatagtaatcaaaatagtgacttgtgacacaactctcaattattttcgattaaatttattgacgcgtcgtttaggttcataagggcaacctcaagtcggctggtaactacttagactagatttccttctctctctggactgccaccaatcgagcatagaatctctggagaggcagataaaaccactaagtagaagggttcaccgcaatttgtcgcactgataataaaatcatcttcattttttcaccaaaatagctgacacagaacgtgtagcccaccaacaattttctcaaaaatttgtcccattttttcgtatacacctgccttacgggagcattgtgaataatgccccgcatgaatgtttgacctgtttgaataactggcatcattgctagcgcaaatcagggcactaattaacacaattcaccacacaacttcccgacaaaggaaatcaggaaaggagtcaaaaaaggggcgttaatcacatcactgcaatttaagtatcagaaatctttgattgaaatttactatcatcatctaagacaaaattaggagaatcctaccgggtactgaagaacctgataataccaagcatcaacaatgcaaaagcagggacaacagctcttcagaacccaagtagccaaactattcaacaattaagtacggaataacgcttcaatattcaaaccttgagtttgcataatatctttcagacgtcgcaaaccttcgacctggatctgacgcactctttcccttgtcaaaccaatctctttgcccacatcttccagcgtttcagcctcatatcccaaaagaccaaaacgacgcgctaatacttcacgttgcttcgaattcaactcaaacagccatttgacgatactctttttcatatcgtcttcttgtgttgttccctccggcccggtttcattctcatccgataaaacatccaatagggctttatcagaatcaccgctaatgggggtatcaaccgaaatgatacgttcattcaatcgcaacatacggcttacgtcatcaactggtttatccagttgctctgctatctcttccgggctaggttcatgatccaatttatgggcaagttctcttgctgtacgcaagtagacgttgagctctttaacaatatggattggcaaccgaatagtacgggtttgattcataatcgcccgttcaatggtttgccgaatccaccatgttgcataggtagaaaacctgaacccgcgctccgggtcaaatttttcaacagcacgaataaggccaagattaccttcttcaatcaaatcaagaagagctaagcctctattactataacgacgagaaattttgacaaccaatcgcaagttgctttcgatcattctctggcgggccagaacatcaccacgtaatgcccgccttgcgaaaaaaacctcttcttccgccgtcagcaaaggagaaaaaccaatttcgccgagataaagctgtgttgcatcaagaacccgctggctcatgccctgcaatacatctaaatcattctcaaaatcagttagatcatccccatcgttcttcaataatttctcatcgaagtcgtcagcttcaataccactttcatctaaatccgcatcatcatacaactcgttaactttcagcgtattttggctcataagctgcccctacccatgataatgcaggcagaattcagcattctgcccagtttatcgctgcggaagataacgcagcgggtttacggattttcccttgtaacgaatttcaaagtgtaatcttacagaactggtacccgtgctacccatagtggcaattttttgccccgccttgatgtcctgttgctcacgaaccagcattgtatcgttatgagcataggcactcaggtagtcatcgttatgttttataattattagatttccatatccacgtaaggcgtttccggcgtagacaactcgaccacctgctgttgcaaatactgactggcccctgctacctgcgatatcaatccctttgttacccccttgggtatcagagaaactctcaatcattttaccttcagccggccacatccaactgctgacagcgctgtttccgctgcttgcggttgtcgtcggtgattctaaatacgtattgcttactgttgacgtagttgcccttggcaacatttttacactcttttgcttcccggaatttgcaggatacgcattagttgattgagaatcaaccagggttgtttgaatttgattatggttataagtggttaacatcccgctactaccggtcctcaaagtctgccccaccgtcaaactgtaaggttctgaaatattatttttgctcgcaagatcacgaaaatcactccctgtgatccaagcaatatagaacagagtatcaccatgtttgactgtataagtattgccgttatagctacctttaggaatactgtcataatcacggttataaacgattctcccctgcaaattgctatcagccgcacccattgacgaaggtgaagatggcattggcgtagatacagcagaattgccggaagatattaccggataacgactcccgctgttttgtttttgatcaatactagtgataggtgcagggcgagttggtgtatttgtacagccgactaaccagactcccatcaataaacacgttacaatccgctgtatttttttcattgggcttcccgaattcatatttccttcccccataacggcaaagataagcgtaaaaattaataattcttaaaggttatacataaccacaaaaatctcaaaacgaaaataatttcgcttattaaagcaaatataaccattaattgaaaaatagttgcaatagactatgaatttaagccagttccccttgcacaagaggcacaaagcgcacagcttcgatcacttcactatgaaaaccattgccatgacgtttcacggatttaagaatttgtgtatgctcgccaacgggcaaaaccatcactccaccatcagtaagctgaagcatcaattcttgtgggatatacggaggcgctgcggtcacaataatagcatcaaataacccacgcgacggccatccttgccaaccatctccatgtcgggttgaaacattatgcaaatcgagctgtttcaaccgccgtttagcctgccactgtaagcccttgatccgttctaccgagaaaacatgtttgaccaaatgcgctaatattgctgtctgataaccagagccggtaccaatttccaaaatcttagcatctggtgttaattgaagcagttcagtcatacgggcaacaatataaggctgagaaatcgtttgcccataaccaataggcaaagccgtattttcatacgctttatgtgccagtgcttcatcgacaaaacgttctctaggcacagcagaaatggcggccagtaaacgttcatcttctattccctgctggcgtaattgtgtcagcaaatttttcattgcccgactcagcattctccatcaacctcagctttagctaaccaatctcttactaacgcctgcgctttatacgcagtcagatctacctgtaatggcgtaatagagacatatccctgttccaccgccgcaaaatctgtttcagggccagcatcatgtttatctcccggtggccccaaccagtaaagcatgttgcctttcggatcttgcatagaataaacttcttccgcggcatggcggctaccacaacgtgttacccgaaaacctttaatgtgctcaagtggcagatcaggaacattcacatttaaaatattacccgccctcaacggcgttgtttgtagcatttgtagcaaacgacaggtgatttctgccgctgtttggtaatgcaattcaccattcagtgaaatagccaatgccggcaaccccagatggcggccttccattgccgccgcaaccgttccggaataaattacatcatcgccaaggttggggccgcgattaataccagaaacaacgatctcaggacgcggaagaaccagccgattaacaccgagatagacacaatctgttggtgtaccacccaataccgaaatgtcaccattctccagcgtattaacacttaatgaacgatcaagggtcaatgcgttagatgcaccactccgattacgatcaggtgcaacaacctgcacatgataattttctcgcaatgctgctgctaaaacctgaatccctggtgcagttacaccatcatcattactcaacaatattcgtaacattattttgatcctgattgataatttccctgaccacactggtagcaaaactgccagcgggtaaccagaaactgattttcaccgtgtcattatcttgccattgccaactcagattctgaggctgcaccagaatcgccctacggcaaccctccaccctttcacgcttgataagttcccacaacgattcataaggctgcaaatattgtcgttcaaaatccgcagcttggtgctgtgttcccaattcaccgtcaccaggcagcggtgcagttatttgtaattctccatcgatcacccgctgttgcaataaaggcaattcagtttcgtcagcaacaaaccaactaccacgccctgttaattgtagggcgtcaccctttattacctgttgttgctgtttcagagcaatccgcgcactggctaccgcattaaacatagcactacgactcgctgacagataaaaactgcgtttacttctctcttttactcggatttcattattcgcccaacgctgcgcttgaatcagattctgcccatcccgaccaaaacgctgttcaccaaaatagttaggcacgccaccttgctgaatcagccgtaatctgttttcaaccaattggtgatgactgatttcccgcaaaatcagcgtaaatgagtttcctttcaatgcgccaatgcgtagtttacgtttctgacgggctgtcgtcagaatttcacatccctcaagctgaaacgaggcaaaatcaggttcctgtttgcccggtaagtgcaaacaaaaccactgttctgtcacggcatgacggtcttttaagccagcataactgaccgatctagacggtataccagcgaaacgagcaaggctatctgcaacaaattgggtattacaacccgttttacgaatatgcaccattaagtgctcaccttctccatctggagaaaatcccaaatcttcacagacaataaaatcttccggcgaagcctttaatatccccgtcgcttctggttgcccatacagccaatttaattcagccaataccatcaattattccttaaccagcaaagcaaccgcttcgcaagcaataccttctttacgcccaacaaatcccaatttctcggtagttgtggctttaacattgatatcatcaatgtgacattgcagatcttctgccagattgactctcatttgtgggatatgcggcaacattttaggtgcttgagcgataatcgtaatatccagattgccaatccgatagcccttttctctgatacgtgagtaggcttcgcgcaataatttacggctatccacccctttaaacgccggatcagtgtctgggaataatttcccgatatcgcccaatgccgcagcacctaacaaagcgtccgttgccgcatggagagcaacatcaccatcggaatgcgccaacaacccttgttcataaggaatacgaacaccgccgataataatcggcccttcaccaccaaatttatgtacatcgaaaccgtgtccgatcctcatgatgcctgttcctttattttctagacagataaaattctgccaatgccaaatcctcagggcacgtgacttttatattatccgaacgcccgttaaccaacaccggttgataaccacaatattccagtgcggaagcttcatctgtaatattagcgtgttgagaaagtgcttttgataaacaatcccttagtaacatcaatgggaaaaactgcggtgtcagtgcgtgccagagatcttgccgttctactgtatggtcaataatctgaccaacccgtccgcgtttcatcgtatcgcggaccggcgatgccagaataccaccgcatgccatatttccctgttcatcggcttctgctaattgtaacaaacggtcaagatcgtcatggtgtaaacaagggcgggcagcatcatgcactaaaacccaacaattatcattgccagtcacatgagccagatgatttaaaccagccagcacagaatctgctcgctgttcaccaccggttaccgtagtaatacgcgaatctgatacaacctcaagagattgaaactgtgtgtccgtgggatttaaaacaatcacaacatgccgaatacgaggatgatcaagtaatgcagacaaggtgtgctcaataatagtctttccagcaatagacaagtattgctttgggcaatccgaattcattcggctaccaatacccgctgctggtaccaaagcaataatatcagcactggaacgaagtaatagattgttcattttaattattgagtattatttggagtcgagggacgcgaagtgttttctttagatttatcaatgattaaacgatagaaagtttcacccggtttgatcatacccaattcactacgggatcgctcttcgatggcttcctgtccacccgtaagatcatcaatttccgccgataactgatcgttacgcgctttaagtttgctgttattacgctcttgcatcgcaacatcattcttaactcgcacataatcatgaatgccgtttttacccagccacagtgagtactgtagccatccaagtaaaaccagtaatagtagcgtcagtttacccatttccgccccctgaaatatctgtcaatcatcccataactcaaagaatgacgccactatcacaaaacagggtaggagaaaaatagttgaatgaagctattttacacaagcacatcactgaaaacgcaataatgtgctttttgttgacgttatccgtgatgaatccttgagcgtataatgccgctctttttcaattccaccagcaactgagtcacggaggtttcaacggattgctggcctggaagataaatctccgggctatcgggaacctcatagactgaatcaatccccgtgaaatgacgaatttcaccagcacgggcttttttgtacaatcctttcggatcacgggattcacaaatttccagtggtgtatcgacaaaaacttcaataaattgccccggttccaacagttcacgaacctttttccgctctgctttataaggggagataaaagccgtcagcacgactaaacccgcatcgaccatcaaactggcaacttcacccacacggcggatattttcctgcctatcctgttcggaaaaacccaaatcacgacaaaggccgtgacgcaagttatcgccatcaagcaaataagtttttattccccgttgaaacagggcctgctctaaggccccagccacagtggatttccctgaacccgataaaccagtgaaccaaataaccaatgcaggatgtccattttcaacctcccgctgcgctctggtcagttgatgtggatgccagacaacattttctaatggcagattttcaatgtcagccaatttatttacctcccagtaaatctctggctccccaatgagggaaatgacgacgaatcaaccgattcaattccagttcaaattcgctgaattcttttggcccttcataaacgtctgtctgaatttcacgtaccaaccctgcaccaacagtgacattagtcagtcgatcgaccaagataatgccgccagtgtcgctattttgctgatagctatcgagcattaatggctcttcaaaagaaaattccaccgatccgatggcatttaatggtaaatcaacagccacccgttgtgtcaggtgagtaatatccacttgatattgaatgttctcaactttcccacggctctttttacccgccactttaatatcaaggttctgcccctgcaccaaaggctgttcagacatccataccacatccaccagtgcatgccgggtaaccatcatctcatcatcggcagaaatcagcagatcacctcgactgatatcaatttcgtctttcagcaccaccgtaatggcttcacccggaacagcaaaatccaaatcaccatcaaaagtcacaatccgctccacctgtgagcagatacccgatggcatgactttaactttctgccctttacgtaaaatcccagatgaaagtgtgccactgtaaccacgaaaatcgagatcaggccggctaacatactgtaccgggaaacgcagtaactgcttcgaggcttccttctttacatcaactgtttcaaggatatccaacaacgttggcccttcataccaatccatattacgacttatagtgacgatattatcgccatcaagtgccgagattgggacaaaatgaacgtccaaatttgtcggcaattggccagcgaaattcatataatcctgtttgatctgattaaaaacctcctgacgatattccatcagatccattttattcaccgcgaccaccaaatggcgaatacctaacaatgtactgataaaactgtgacgacgggtctgctcctgaacacctttacgcgcatcaatcaacagaatagagagatcacaggtcgatgcccccgttgccatattacgggtgtactgctcatgtcccggcgtatcagcaatgataaatttacgtttttctgtggaaaaatagcgataagccacatcaatggtgataccctgctcgcgctccgcagcaagaccatccaccaataaagccagatctaatttttcaccctgggtaccgatacgtttactgtcattctgcaatgttgaaagctgatcttcgtagatctgacgggtatcatgtaacaagcgtccaatcagagtacttttgccatcatccacgctgccacacgtcaggaaacgcagtaatcctttctcttgttgagcgtgcagataagcttccacaccgccctgttgtttaatttgatgagcaatggtttcattctgtgcaagcgctgacatggttgttctccttagaaataaccttgacgttttttcagttccatagaagcagattgatcactatcaatcagccgcccttgccgttcacttgtcgtcgatatcagcatctcttcaataatttccggcaatgtttcagcatcagatttcactgcacccgtcagcggccaacaaccgagagtacggaaacgaactttgcgctggctgataacctcgcccggtttcagatcgatccgattgtcatcaaccataatcagcgtcccctcacgctccaataccggacgtaatttggcaaaataaagaggaacaatatcaatttgctccaaatagatatattgccagacatccaattcagtccaattagacaatgggaatacgcgaatactttcacctttgttaatctggccgttgtaattgcgccacaattcaggacgctggtttttagggtcccaacgatgtgagcgatctcggaaagaatagatccgctccttagcccgcgatttctcctcatcacgacgagcgccgccgaaagcagcatcaaaaccatatttatccagtgcctgctttaacccttccgttttcatgatgtcagtatgtttggcactaccatgcacaaatggattaattcccattgcttccccttgcaggttacgatgcaccaacagttcaaagccgtaattcttcgcagtacgatcacgaaattcgtacatttcacgaaatttccatcccgtgtccacatgcagcaaaggaaatggcaatgttcccggatagaacgccttgcgtgcaagatgaagcatgaccgaagaatctttaccgatagagtaaagcatcaccgggttttcaaactcggcggccacttcccgtataatatgaatactttcagcttcaagttgctgcaagtgtgtcaatcttttctcatccattacaactccttatgcaaaatcgactactgccggacggcttatcttggcaatagattgctgcccaaaccaagctatctgatggtgaagttgagccacctctcccaccactagtaaggccggcgacggggcctgctgtgctaactgttccagttcaagcaaagtgccggttaacacttgctgctctaaacgagtaccacaaccaatgacggctaccggtgtatcttccgctcgcccatgtaaaattaattgatgacttatcaaggcggctttgaccgtccccatataaatcaccagagtctgatgacctctggctaaagccggccaatccagctcattccccttttctcggcaatgacctgtaataaaagtgatactctgtgagtgttccctgtgagtcaaaggaatacccgcgtaagccgtcgctccgatggcggcagtaattcccggtacaacctgaaaaggaatgcctgctgatgctgcaacctgtaattcctcaccaccacggccaaaaataaagggatcaccgcctttaagacgaacgacttttttcccctgtctggcaaatttcactatcaatcggttagtctcctcctgagaaacagagtgattacccgctcttttgccaacgcaaattttatctgcatcacggcgaatcaaatccagtacatcactgctgaccagatgatcataaagcaccacatcagcctgctgaataacctgcaatccctttagcgtcagtaatcccggatcaccaggaccagccccaaccagagccagttctccctgcaaatcagactgttctagttgttgctcaagctgtttttccgcctgctggatttgaccgtttgcaaccaacatagcgaaacgaccattgaaagcctgttcccaaaaagaacgacgctggcgcatggaagttaatcgctgttttactcgctcacgccacttcccggcgatttttgccatcgtaccaagactggaaggtagtaatgcctccagtttctcccggattaaacgcgctaataccggcgcttttcccgctgatgagatcgccaccaaaaccggagaacggtcaataattgatggaaaaataaatgagcaatgaacttgatcatcaacgacattgaccaaaatactgcgcttatcagcttcagaaaaaacctgatgatttagaatacgatcatcagtcgcagcaataactaaaaagatgccatcaagatattcaggttggaactctccctgataccattccaactcaccagcttgataacgctgttgtaattcagagcacaattcaggcgcgacaacctgtaataatgcacctgcccgtagtagtagagtcgccttacgtgcggccacctctccaccaccgacaagtaatacaagccgccctttcagctcaacaaatatcggtaagtaatccacaattgcccttgatatccagtgaaatatttataagtactgaaactgtttcgaatgaatatatgagtcagcggtaaagttataaaatgacaaaaaagaatttgatgttctgtaatggaatatagccaacctctctagaacagggctagtgtgtttttttgcactacatcgctaagggcaggaaaagtaaatgacttcaaaatttgacttcatatgtcattgagttcaatataacttcataatctgacttcacagaaagcaatacgagaaatgaaagaacaggtttcaatgctcaggaagaggcaaaaaaatacgttggagcagatatttaaaatgcctgttcctgcgggaattaagtggtctgacgtggaatcactcataatcgctctgggaggtgaggttaaagaggggaaaggttcacgttgcaggctgttgctaaacgatagtattgccagatttcaccgtccacatccctcaccagatactgacaaaggggccgtcgtcagcctacgagaatggttagaaagcataggagttgagccatgaagatgacagtacaaaatacaatggtaatagccggacagcaggctattattagctacgtgccagaaattggcatgttcaggggtaaatttttagggctgtctggttattgtgattttatctctgatagtattcaggggttgcaagatgagggtaaaatatctctacatgaatatcttgaagattgtaacgcatcaggtattgaaccttatgcaaggcaagaaaaaatcaaaacatttactctgcgctaccccgaatcatttggagagcgattgcattgcgcagcagccgagcatcagatttcggtgaatgcgttcatcattgaaactttaaatgaacgaatgaaacacgcgtaaaaatccgactaaattgtctttcagactatttatattaatcatcaccctcgccttaaaacaaagcgagggctttatcatcaatcccactcaggaaataccggttttttaattctcatgtaacccacattctcgcttcaagccaaaaaaacgggtttgttcttcactcatgcccggttcccatttttgagttgtatggatgtcaccaacagagagataaccctgttcccataatggatgatattccaagccatgttttgtcagatattgatgcacacgccggttatcccagtcgataatcggcaaaatcttaaatactccccgctgtacagctaaaaccggtaattttgatcgactttcagattgctgacggcgtaaaccagcaaaccaactttgtgctctcagatttttcaaagcccgattcattggttcaaccttattaatctgattgtaacgctctattccctctacgccttgctcccacaatttcccatagcgagcttcctgccaggccggggaatgctcagcactgaatacttgcaaattcagtttcagttgcgttgtgagtttatctatgaattgataagtttcagggaatagataaccggtatcagtaagtatgaccggaatatcaggatattcttgtgtcactaaatgaagacataccgccgcctgaataccaaaactggaggaaagaacaaactcccctggcaaattttccaatgcccagtttactctctggtgagcatccatcatttcaagccgaagattaatctcagccagtgattgctcttgttgttcagcagtcatactaacacattgagataagctgaattggctcataccgcctcctgccaatcgtaaaaatcgcgggctgaatccagtaccggcttgataatatccgtgcggatcaggaaatcaccaaaaccttcatttggctgccgacctgtcgcccaacgcccaataagttcatccatgatggataaaatcgcttgtgagctgatattttctttatacatgcgtggaatacgggtaccaatccgattaccaccaagatgaaggttataacgatcaagcgctttgccaactagccctacctccgccaacatcgctctagcacaaccattcggacaacccgtcacccgcaaaacaatatgttcatcaccaataccgtgtttattcatcaattgttcaacatgagtgacaaactccggtaaaaaacgttcagcctcagccattgccaatgggcaagttgggaaagagacacaggccattgagtttttacgctgaactgtggttttatcgtcaatcaatccatgccgacaggcgatagtttcaatgcgttgtttctcactttcaggaataccagcaatgattaagttctgattggccgtcaggcgaaaatcccctttatgtattttggcaatttcagcaacaccgcttttcagcggcttgccggggtagtccaaaaggcgaccattctcaataaacagtgtcaaatgccatttatcatcgatacctttcagccagccaatttgatcaccacgaccagtaaattcataaggtcggattgcctcaaatttcacgccagcgcgtctctctacctctgctttaaaagtctcaacaccaacccgctccaacgtatatttggttttggcatttttacgctcagtccggttaccccaatcacgctgagttgtcaccacagcttccgcaattgccaacgtatgctcaagcgggatataaccaaactcactcgccatacttggataggtatttttatcaccgtgagtcatcgccaaaccaccacccaccaacacgttaaaaccaaccaacttgctaccttctgcaatagcaataaaattcagatcgttggcatgcagatcaacatcattctgtggaggaataactaccgtggttttgaatttacgcggcaaataagtcgagccaagaatcggctcttcatcggtcgttgcgactttttctttatccaaccagagttcagcataagcacgggtacgtggcagtaaatgttctgagattttcttcgcccattcgtaagcttgctgatgtagctctgattgaataggattcgaggtacaaagcacattgcgattaacgtcattcgccgtcgcgagcgaatccagcccaacttgattcagcaattgatgcgcaagttttactttcccttttaaaatgccatgaaattgaaatgtctggcggttagtcaaccggatactgccataaagggtattctcttcagcaaacttatcaatgcccaaccattgctgtggcgtaatcacgccacccggcagacggcagcgcaacattattgcatgacgtggctccagtttttgctcagcgcgttcagcacggatatcacgatcatcctgctgatacatgccatgaaaacgaatcaacaggaaattgtccccttcaaaacctcccgtcaagccattagttaaatcttcactaatcgtacctcgcagaaaattactctcctgcttcatacgctcactgtcagccagtttaccttcgacaataaaaggaccatgttgtttatcgttcattagtacacatccctctgataacggcgctcaaagcgcagttcacttaagaattcatctgcctgttcggtatccatgccgccatgctcagcaataatatccaataacgcatgttccacatcttttgccatgcggtttgcatcaccacacacatacagatgtgcaccttccttaatccagcaccataccgcttcaccctgctcacgcagtttgtcttggacataaattttatgctgctgatcacgggaccatgccagatcaatacgggttaacaggccatctttgacataacgctgccactccacttgatagagaaaatcttcagtaaaatgtggattaccaaagaacagccaatttttcccttcagcgccatcagcttccctttgctgcataaatgcccgaaatggtgcaattccggttcccggcccaatcatgatgacaggcgtgcgtggatcggcaggcagacgaaaattatcgttatgctcaataaaaatacgaatatcactattttcctgtaagcgatctgccagatagccggatgcaccgccagtgcgggcccgtccgtcaatttcataacgaaccacaccaactgtaagatgaacttcattttccatttctgcctgagaagaagaaattgaataaagtcttggtgtcaaaggccgtagcaaatcaataaattgctgcgcctctggttgagaagccgcttcccttatcatatcggcaatcggcttgttgtgagcgtattgttgtaatgcttgtttatcagcaatcaaagaaagtaatttttcatctttcgcgagaacggcgtatttttccacaatcacactggtattttgggttagctcaacatggctgatcagcgcttctctcaatgacaatttctgaccattaacctcaacttgttctgttccctgcaaccagagcaaattcaacacttcatccaccagctccggatcattttcaaaccaaacacccaaagcatcacctggctgataacgcaaacctgaatcacccagatcaatttcaatatggcgaacatctttatcagaaccacgacccgttattttctggcaagtagctaaagccgcagtcaatggtgcctgtttagtataagaagttgaaaaaacttcatttaccgatctgtcctgtgcagaagtaatctcagttcctgtctcagttggaatacgctgtttcaggattccagttaattgtttacgccactgatccgcaacctgctgatattcgacatcaccatctacacgctccagaagccgttgagcgcctaattcattcagacgattatcgaaatcttttccagcctggcaaaatcgctcataagaggtatcacccagaccaaaaaccgcaaataccgtatcattcagcttcggcacctttttagaatagagatatttatacaatgcaaccgcttcctcagcaggttctccttcaccttgggtagaagcaataattatcagtatcttttcttgagcaatttgtttgaatttataatcaccggcattgaatagattgacattgagtttctgtgccaacaaatcctcacggagctgctcagctaaacgacgagcattaccggtttgtgaagctgaaattaatgtaatcgtctcctgtgccggaaccgccggaaccacagcctgaacctgtggttgttgattcaccattccccaaaaataaccagacaaccaggctaattgagttggtgaaaaatccccaatctccgattgcaaacgcactagctgttcaggtgaaaccggaagaagtgaaattgaaggtggttttatgctcatgtcctgtgctgccctttacgattaccaatgtccgttatttttagtagaaaaaataaatagggatggtttgtaaggttatctcagcgacttgtgactatttaaagaaactatcgcaatatcaaataaccaaaacgcctaaccatatttacagatttaatatatctataaaacagttaataagagcaatagcaaaaaaatgaaaaaaccaggtttaattcagaagatcgggtagaatagcgggttttttgaagtcagggagaaccactatgagcacaacgatttttaaagattttcagtttgaagctgcccaccgtctgccacatgtcccagaaggccataaatgcggtcgcctgcatggacactcatttatagtacgactggaaattaccggggaggtcgatcctcatagtggctggattatggactttgccgatttaaaagccctattcaagcctgtttgggaacagctagatcaccattacctgaacgatatccctggactggaaaatccaaccagcgaagtattggcaacctggatttggcataaagttaaaccaatagttccacaactcagtgccgttatggtgaaggaaacctgtactgcgggatgtattttccgcggcaaatgaaacaacttactgcaccaggaaacctccagtgcagtaagcttttctcaggcgatattcaaatatttatgtgtttgcatagaaaatcgccaattacgggcaatacaggtttcaatacataaacgggtagcttcttctttctggctaatcggttgcaatgcaataatacgtgatgagttgtcatttaatgtcgctaataactcatccaatgcttcaatatccctttccctcgcaactggatattttatttcattagctctctgcaaagcctgctgcaatatccggtaaccaccacgcatgttaacttttggtgaaaccgtcacccaagtagcagcagaacatttaacatgatacgtaccactggtttctatctggcattggtagccaagactttctaactcttcggtcagaggaataagatcatagagacaaggctcaccaccagtaataacaacgtggcgtgcggtatatttctgttgaacaaacagcgctgtaatttgcttaggagaagctttactccattcattgctttcactcgtcttcagcaaaattgtttccaatgtccgttgcttttccacttctttctcccaagtgtgtttagtatcacaccagctacaaccaaccggacacccttgtagacgaataaaaattgccgggacgccggtaaaaaaaccttctccctgcaatgtctggaatatttcgttaatcgggtaaaacatacaaatctctggtttcattaggcaagggcgcattattgcagatatctatccctcgaacatcaatctttatgataaggtacggggtttgcttcgcttagctaacatgcgacttgtcgaggcattgtgtgcttaaaatatatctagcactgagaaagtgacaggaataaataatgcagaataatgaaactcagctgaaacggggtctaaccgggcggcacatccgctttatggcattaggctccgcaataggcacagggctgttctatggctccgcagctgctattcagcaagctggacccgccgtattactcgcctatttaatcggcggtgctgccgtatttatggtgatgcgtgcattaggtgaaatggctgttcaccatccagtagccggttctttttcacactatgccagccattacctcggacctttagccggatttctaaccggatggaattatatattcgaaatgctgatcgtctgcctggctgacgttactgcatttggtttttatatgaagctctggttcccccatgtggagcaatggatctgggtactaagcattgtctgctttattggcgcaattaatctttgtcatgtgaagattttcggtgaaatggaattctggctttcgattgtgaaagtcaccgcaattatcgctatgattatcggtggcatgattatcatgatctatggattcggccaagaaacagatcatgcaaccggcattgccagtttgtgggaatatggcggttttatgcctaatggcatcagtggtgtgatagcgtcactcgctattgtgatgtttgcttttggtggtattgaagtcattggtattactgccagtgagaccaaaaaccccgagaaaacaattccaaaagcaatcaacgctgtccctttccgtattctgctgttctatgtactgactctgtttattttaatgtgtatttatccgtggaatcagatcggtcaagaaggtagcccattcgtacagattttttctagcttgggtatcaattctgctgccaacattctcaatattgtagtgattactgccgcaatttcagcaatcaatagcgatatttttggtgctggtcgtatgatgtacggcatggcccaagaaggacaagcgcctaaatcattcaccaagctgagccgtaatggcgtaccctggatgactgtaatcgttatgtcagcagttctcttaattggcgttatactcaactatatgattccggaagaaattttcgttatcattgcctctatcgcgacatttgctactgtatgggtatggttaatgatcctactttctcaggttgctatgcgccgcaaaatgagcaaagaagaagttaagaccttgaaattccccgtacctatgtggccaatagcgccagcattaaccattatctttatggtatttgttattgtattactgggctatttcgagaaaacccgcattgcattaattgtgggaatcacatgggtaatcttattatcaatcacctacttctttagcaaaaagaaaaatatttctcaaatccatcagataaataaataattttcattcataaaaaatgccagattaatctggcatttattttaatttacccaaatgaaatatatttaatatttatctcaatataacttacacatattaattaaaataatttatatattattttaatagaaataaattttatttttaaaatataaacccatcaaaacagataataaacagttacaataaagtaataatgatataatgttttttcaatgaattaaataagaatttaattcataaaaaatagatggatatattcttataataaagagttaataaaaattcacaacaagaggattatgatcggaggcatcagtaggtatcacaatagcattagcgatattcaactctcggtaaaaaataaaatctaaaggtctaccaaatgcgattgttcgatagtcatcagtaaaagatacttcttcaaggtgtaaatatctggtaaaacgttttaaagcatttaatcgttgcttactccatgcattaaaatcaccagccataatgactgggccattatgtaaacgaacatgaacaccaatattattcaactggcggctatacacatccacaccaaaactgaaatttatcgcatgcacattaataaccattaactgacgattatcttgtaaaagataaacagtgatgagagcggacttagataaacgtaaaagaggctctttctctctcaatgggcaacaatagacaggatgagaagttgctaacgtcattacaccagaggggtgttgtggtaatagaaatgcgggaacttgatcagatattaggtaatttgaggtagcaaattcaactaaatcaggagttgtctgcgcttcttgtaataaaatcaactggctttcgttagtcagctctttcagaacctttcgccatgaaggacgctgctgtttatagatattccatacaacaaccctaagctcatttgtaccagtgatcaaaggagtacctacaggtaatgtattcccaagctgatgagtcgacataggaaagacacgttcaacaggttgtccagcaacatatcttatcgcataggttttttttaccacgtaaaaaacctcttaagtacaaaataactataaaaactatccgattctatcaaatataataaggtaattattgattttaatactcataaacagcaaaaaaccctgaaatttctctcagggttttctctgcaaattaaggtggcggtgcggacggggctcgaacccgcgacccccggcgtgacaggccggtattctaaccaactgaactaccgcaccaccgaattctctttgatttatatcgctgttacgacataaaacttaaatatcaagcttggcagcttacaaacggctttcctgccgtttgctcttcgggccgtcgcccctcgcgacgttcaaatccgttcccgacggagttaccctactcgctaccactggggccttgtattgcttttctatcgccatacaacgcaaaattaaagcctggcagtgtcctactctcacatggggagaccccacactaccatcggcgctacggcgtttcactgctgagttcggcatggggtcaggtgggaccaccgcgctatcgccgccaggcatattcggttttcttccggccgttgtcgctcttctgccacaaccacccgaatcaatctctgaacaagcgaaaaatctctctctgctgtcttccgacaccaaaacaccttcggtgttgtaaggttaagcctctcggttcattagtactggtcagctcaatgcatcgctgcacttacacacccagcctatccacgtcttcgtcttaaacgttccttccgtgacctcagtcaggggaagactcatctcaaggcaagtttcccgcttagatgctttcagcggttatctctcccgcacttagctaccgggctatgccattggcatgacaacccgtacaccagcggtgcgtccactccggtcctctcgtactaggagcagcccctttcaatcttcctgcgcccacggcagatagggaccgaactgtctcacgacgttctaaacccagctcgcgtaccactttaaatggcgaacagccatacccttgggacctacttcagccccaggatgtgatgagccgacatcgaggtgccaaacaccgccgtcgatatgaactcttgggcggtatcagcctgttatccccggagtaccttttatccgttgagcgatggcccttccattcagaaccaccggatcactaagacctactttcgtacctgctcgaaccgtcactctcgcagttaagctggcttatgcctttgcactaacctcacgatgtccgaccgtgattagccaaccttcgtgctcctccgttaccctttgggaggagaccgccccagtcaaactacccgccagacactgtccccggcccggtttacgggcccaggtgagaacatcgaacattcaagggtggtatttcaaggatggctccatgcagactggcgtccgcacttctcagcctcccacctatcctacacatcaaggctccatgttcagtgtcaagctatagtaaaggttcacggggtctttccgtcttgccgcggggacactgcatcttcacagcgagttcaatttcactgagtctcgggtggagacagcctggccatcattacgccattcgtgcaggtcggaacttacccgacaaggaatttcgctaccttaggaccgttatagttacggccgccgtttactggggcttctgtcaagagcctcgccttgcggctaaccccatcaattaaccttccagcaccgggcaggcgtcacaccgtatacgtccacttacgtgtttgcacagtgctgtgtttttaataaacagttgcagccagctggtctctgcgactggcttcagctccggaggcaaactccttcacctaccgccagcgtgccttctcccgaagttacggcaccattttgcctagttccttcacccgagttctctcaagcgcctgagtattctctacctgaccacctgtgtcggtttggggtacgattcaatatgacctggtgcttagaggcttttcctggaagccgggcatcaaccacttcaccgccgtagcagctcgtcatcacgcctcagtgttcacagaagagcggatttgcctgctcctcccacctacacgcttaaaccgggacaaccgtcgcccggatggcctagccttctccgtccccccttcgcagtcacattcagtacaggaatattaacctgtttcccatcagctacgcctctcggcctcaccttaggggtcgactcaccctgccccgattaacgttggacaggaacccttggtcttccggcgagcgggtttttcacccgctttatcgttacttatgtcagcattcgcacttctgatacctccagcaggcctcacagcgccaccttctccggcttacagaacgctcccctacccaataacacttgcgtgtcactgccgcagcttcggtgcatggtttagccccgttacatcttccgcgcaggccgactcgaccagtgagctattacgctttctttcaatgatggctgcttctaagccaacatcctggctgtctgggccttcccacatcgtttcccacttaaccatgacttcgggaccttagctggcggtctgggttgtttccctcttcacgacggacgttagcacccgccgtgtgtctcccgtgataccattcttcggtattcgcagtttgcatcgggttggtaagccgggatggccccctagccgaaacagtgctctacccccgaagatgaattcacgaggcgctacctaaatagctttcggggagaaccagctatctcccggtttgattggcctttcacccccagccacaggtcatccgctaatttttcaacattagtcggttcggtcctccagttagtgttacccaaccttcaacctgcccatggctagctcaccgggtttcgggtctataccctgcaactctttcgcccagttaagactcggtttccctgcggctcccctatccggttaaccttgctacagaatataagtcgctgacccattatacaaaaggtacgcagtcaccccaccccaaaacgctccactgcttgattggtgtgttgggcgtcgctgccgctccgccaaccgtcatcagtgctgctgttacgcattttgtgcaccacgcaaagtgaaacgctttggtggtggggctcccactgcttgtacgtacacggtttcaggttctctttcactcccctcgccggggttcttttcgcctttccctcacggtactggttcactatcggtcagtcaggagtatttagccttggaggatggtccccccatcttcagacaggatttctcgtgtcccgccttactcatcgaactcacagccataccatcttcgagtacggggctgtcaccctctctcgccggcctttccagaccgttcctctgatgctatcgctgatgcaggttctgggctcctccccgttcgctcgccgctactgggggaatctcggttgatttcttttcctcggggtactgagatgtttcagttcccccggttcgcctcattaacctatgaattcagttaatgatagtgcaacgcattgcactgggtttccccattcggacatcgccggctctgtcgcttcatatcagcttaccgacgcttttcgcagattagcacgtccttcatcgcctctgactgcctaggcatccaccgtgtacgcttattcgcttaacctcacaacccgaaagagtctcggattgttcagcttgagagatacctcaataatacctcggcgatattattgagcatttcaatttttcagcttgttccagattgttaaagagcaaaataattcgcagcatactgtcgccaatatactctgaattaggttgagtatggtggagctaagcgggatcgaaccgctgacctcctgcgtgcaaggcaggcgctctcccagctgagctatagccccatacagaaatagaccgctatcgcagagttttcttcaaaccttttcatcgcagccagtttcaacgcgaatcacgcagtgtgcgcgagcacatgagtaatgcagcgttcgaaaatggcaaagaggaaaagcgtttggtaggcctgagtggacttgaaccaccgacctcacccttatcaggggtgcgctctaaccacctgagctacaagcctatcacgataacgttattctcttctttcatcagacaatctgtgtgagcactgcactcaacctatctcaggtaaggaggtgatccaaccgcaggttcccctacggttaccttgttacgacttcaccccagtcatgagccacaaagtggtcagcgcccccctttcggttaagctaccgacttcttttgcaacccactcccatggtgtgacgggcggtgtgtacaaggcccgggaacgtattcaccgtagcatgctgatctacgattactagcgattccgacttcatggagtcgagttgcagactccaatccggactacgacagactttgtgtgttccgcttgctctcgcgaggtcgcttcactttgtatccgccattgtagcacgtgtgtagccctactcgtaagggccatgatgacttgacgtcatccccaccttcctccggtttatcaccggcagtctcctttgagttcccaccttcacgtgctggcaacaaaggataagggttgcgctcgttgcgggacttaacccaacatttcacaacacgagctgacgacagccatgcagcacctgtctctcagttccctaaggcacttcgctgtctccagcaaattctgaggatgtcaagagtaggtaaggttcttcgcgttgcatcgaattaaaccacatgctccaccgcttgtgcgggcccccgtcaattcatttgagttttaaccttgcggccgtactccccaggcggtcgatttaacgcgttagcttcggaagccaccgttcaagaccgcaacctccaaatcgacatcgtttacagcgtggactaccagggtatctaatcctgtttgctccccacgctttcgcacctgagcgtcagtcttcgtccagggggccgccttcgccaccggtattcctccacatctctacgcatttcaccgctacacatggaattctacccccctctacgagactccagtcaaccagtcttagatgccattcccaggttgagcccggggatttcacatctaacttaattgaccgcctgcgtgcgctttacgcccagtcattccgattaacgcttgcaccctccgtattaccgcggctgctggcacggagttagccggtgcttcttctgcgggtaacgtcaaaatctaaccctcttcaggctaaacccttcctccccgctgaaagtactttacaacccgaaggccttcttcatacacgcggcatggctgcatcaggcttgcgcccattgtgcaatattccccactgctgcctcccgtaggagtctgggccgtgtctcagtcccagtgtggctggtcatcctctcagaccagctagagatcgtcgcctaggtaggccattaccctacctaccagctaatcccatctgggttcatccgacggcgtgaggccctttcaggtcccccactttggtctcgcgacattatgcggtattagccaccgtttccagtggttatcccccgccctcgggcagatccccagacattactcacccgtccgccgctcgtcagcaaaagtgcaggcactttcctgttaccgcccgacttgcatgtgttaggcctgccgccagcgttcaatctgagccatgatcaaactcttcaatttaaatcaaagtttgatgctcaaagaattctgactaattatttcgtaatgaattaactgttgttcactcttcaagactttaaaacgtatttttttgtgatacggtctcgtgagtgcccacacagattgtctgattaattgttaaagagcaggctgacataaaaaataacattctcgttcagccgggctgcgtatattacgctgttcgcccgcagagtcaagcactgattatcgctttctctgcccgacctcacaatgtttatcagcgttgtgtcggtcagtggtggcgcattatagggcgttctttgacgctggcaagcatttatttgaaaaaaacttttattcgaggattttttcaacaaaatgatgatataaagaacaaaaagcctattttttgatgcctttaattgctttaggtaagtctgcaagactatttattatcaaattagccgcttgttcagcttcagtgttaacgggtttacctgtgcgaactaatactttagtgccaatttttgccaacgtcgcggcttgcatatcttcgagtttgtcaccaatcataaaagaagccgtcatatcgatactcagctccctctgcgcatccagtaacatacccggctgcggtttacggcagtcacaactcttcttatattgctcttcagttgcatctgggtgatgagggcaataataaatgccatccaaatccacaccacggtctgctagcgaccaatccatccattccgtcagttgcaaaaactgctcttcatcgaaaattccacgggcaatacctgactggtttgtgactaataccagtgcataccccatctttttcaattcaatcatggcttcaatgacaccatcgataaattgaaaatcatctatttcatgtacataaccatgatcgatatttattgttccgtcacgatccaaaaatacggcaggaataccttgtgtcacccgattgctccaaaaatgtaagaagcccccagtatcgcatgatttagccatgaatgagaatgcagcaattaatttattcacagttgacttagacgtctagacaccttaacatccgattaaacgggtggtttgctttttcaaaaatgttcaagctatcaattttcaaaatttttataaaaataaataagaataaaaatgataaaactgtttcatatcaataaaatattccagcagggtgcccgttctattaacgcgctttcagatatcagcctgcatgttccgcaagggcaaatttacggtgttattggctcatccggcgcaggtaaaagtacactaattcgctgtgtaaatatgcttgagcgcccaacttccgggcaagtattggttaatggtcaggatttaactatcttgtctgatagtgatttaactcgtgcacgtcgtcgtatcggcatgattttccaacacttcaatttgctctcttcaagaacagtgttcggcaacatagctttgcctttggaattggataacattccaaaagccgaaatcaaaaaacgggtagatgagctattggagcttgttggtcttacagataagcatgatgcctatccagcaaatctctctggcggacagaagcaacgtgttgctattgcccgtgctctagctaattcacctaaagtacttttatgtgatgaagcaaccagcgctctagatcctgcaacaactcgttctattctagaattattgaaagatattaatcgccgtttggggctaactattctgttaattacacatgaaatggatgtcgtcaaacgtatttgtgaccaagtagccgttatcagtggcgggcaactgattgaacaagacattgttagtgaagtattctctcatcccaagacacctatcgctcaggcatttattcagtcaactttgcatctggatatccctgaagattatgtacaaaaaatgcaaagccacccagcaccaaatcttagtccattattgaaattagagttcaccggtcagtctgtagatgctccactgatttcaatggcagtacgtcgttttaatattgatatgaatatattaagttctcaaatcgactatgccggtggcgtaaaatttggtgtgatgttagctgaattacacggtgaaaatggtggcgttgagtcaacgattaagtttttacaagatcatcatgtgaaagtagaggttctcggttatgtctgaaggaatgatgttattactggctaaaggcgtctgggaaactctagtaatgacttttgtttctggtttctttggcttcattatcgggctgccgataggtgtattgttatatgtcacccgtcccaatcaaattatggaaaatagtaaactctatcgttttctttcagcggtagttaatattttccgttctatcccatttattattttactggtgtggatgattccttttaccagactaattgtgggaacatcgatcggtttacaagctgccattgtcccattaaccataggtgctgcaccatttattgctcgtatggtggaaaatgctttattagaaattccatcgggactcattgaagctgctagagcaatgggagcatccccattccagattataaagaaaattctgttacctgaagcattacctggtttgctcaatgcagccacaattaccctcataactttagtcggttattctgcaatgggaggtgcggtaggtgcaggcggattaggccagattggttaccaatacggatatatcggctataatgcaacagtaatgaataccgtattagtgttactggttattttagtttatttaattcaattaagtggtgaccatttagtcaaggccacaacacgtaaataacaagattattttaatagcagtacctgtgtcggtgctaataaatcagtattctataggggtaaagtatgtctgttaaattaaaaaccatcgcaactatcagcgctcttttaggttcattaattctgtctggctgcgggcaggaaaaacaagatccaaaccatattaaagtaggcgttatcgttggtgcagagcaggaagtggctgaaattgcaaaaaaagtcgctaaagataaatatggtcttgatgtagaactggtaacctttaatgattttgtattgccaaacgaagctctgagcaaaggcgatattgatctgaatgcataccagcacaaaccctatatggatcagcaaatcaaagatcgtggttataagatggtcaccgttggcaactcttttgtttatccaattgcgggttattccaaaaaaattaagtccttggatgaattgcaggatggttcccaaattgcgttaccaaacgatccaacgaacttaggccgttctttattactgttacagaaacaaggtttaattaaattgaaagatggcataggcttattaccaacggttctagacgttgttgaaaatcctaagaatttaaaactagtcgaattggaagcaccacaattgccacgttcactggatgatcaaaaaattgctctcgccatcattaatacaacctatgcaagccagattggtctgactccagcaaaagatggtttatttgttgaagataaaaattctccatatgtaaacctactggttagtcgagaagataataaagatgctgaaaacgttaagaaattcgttaaggcatatcaatcagacgaagttgatgaagctgccaataagatctttaatggtggtgcagtgaaaggttggtaatctttcatattacgttcatcgatattagaataatcaggcggacagattgtccgcctgatttattatggcatcatgttttcggtattttttgttaacctgatcgactcgcttaactctaacagtaaaaattcgaggatctatcatgcgtaggctacttgcctctttattagcactgtccataacaggatgttcagtacaacaagcaacatttcctgacgcttcccagttatcagatatgaagtacacaaaactatcaaccggagaaaaaaaacatttctcttcatccgtaaagttatataccaaaagtgaagaattattaggtgtctcatttaaagatttagggattgtttctggtcaatcgtgtcgtagttccttacaggatccacccgcaaatatcatcgtggctcgcaaccagatgatgaccaaagcagcttatttgaatgctaacgctgttttattgcatcaatgcgaaatattatcaggccaaggatgctaccagatagcaatatgtgaaggttcagccttgcttatcacccaatgaccgatttccatttcacgcagataggggttatccactccccttataaagaaaaatttgccgttccccgccaacccggtcttattgaagatggtggtgggaaactggtacttcttcctccctataatcaaccggatgcagttcgtggtctggaacaatttagtcatctgtgggttattttcatcttccatcaaacaatagaaggcggctggaagccaatggtgcgtcctcctcgtttaggtggcaatgcaaaaatgggcgtattcgcaacccgttcgacttttcggcctaatccaattggcatgtctctgattgaacttaaaggaatcgaatacaggaaaggtcgagttattctggaactgggtagcctggatttagttgatggtacgccggttatcgatattaagccttatctgcctttcgctgaatgtcagccacatgcaatggcgggttttgcgcagcaagctccttctaccaatatggaagtggtattttcgcctgccgctgagcaacagctaatctcaattcaaaatatttatccgaatttacgccgttttatcagtcaagttttagcccaagatcctcgtccagcttaccggagaagagaacaggaaaatcgggaatatgctgctcatttactggattttaatgtacgctggaaaatctgtggcacattgaccgaagtagtctccatagatccccattaaaaatcagcatatacccttttggcatcttaaactcactggtagactaaagacttattttcgtttttttattggctggcaaatttctgccagtcagaagcaatttgctgctctaatggaacctaacaatgcgtactagccaatatctgctctctacattaaaagagactcctgccgatgcggaggttgtcagccataagctgatgctgcgtgcgggcatgatccgtaagctcgcttcaggtctgtacaattggatgcctacaggtatccgtgtactcaaaaaagtcgaaaaaattgttcgagaagagatgaacaataccggagcgattgaaatatctatgcccgtcgtacaaccggcagatctatggcaagaaagtggccgctgggaacaatatggtccagagttactgcgttttgttgaccgaggtgatcgtccttttgtactaggcccaactcatgaagaggtcatcactgatctgatccgcaatgaagtcagctcatataagcagttaccactgactctattccagatccagactaaatttcgcgatgaagttcgccctcgttttggcgtgatgcgctcccgtgaattcctaatgaaagatgcttactctttccatgctacccagacatcattacaagaaacttacgacaacatgtacgaagcctacagcaaaatttttacccgtataggtttggattttcgtgctgttctggctgataccggttccatcggtggtagtgcttctcatgaatttcaggttctggcagccagtggagaagatgatatcgtcttctccactgaatccaactacgcagccaatattgaattagccgaagctgttgcccccgctcatgatcgcgcagtaccaacagaagatatgcatctggtagataccccaaacgcaaaaacaattgctgaactggttgagcaattcaatctaccaattgagaaaacagttaaaaccctgatggttcacgcagcagaaggaacaagtcataaattgatcgccttactggttcgcggcgaccatgaacttaatgaaatcaaggcagagaaattatctttagttgccagcccactgactttcgctaccgaagaagagattcgctcaattgttggtgcaggcccgggttcattgggacctgtcaatctgccaatacctgctattattgaccgcagtgtggcagtgatgagtgactttggcgcaggtgccaatatcaatgacaaacactatttcggtattaactgggagcgtgatctaccagtaccagaggttgctgatatccgtaatgttgttgaaggtgatgccagcccggatggtaaaggtacattgctcatcaaacgtggtattgaagtgggccatatcttccagcttggcaccaaatattctgatgccatgaaagcgacggttcaaggcgaagacggccacaatcagatagtcactatgggctgttatggtattggcgtcactcgtattgtcgccgcagcgattgaacaaaatcacgatgaccgcggtatcatctggcctgatgcaattgcaccattccaagttgctattttgccaatgaatatgcacaagtcataccgtgttaaagaagttgcagagaaactgtatgccgatctacgcgctagcggtattgatgttatttttgatgatcgcaaggaacgcccaggcgtgatgtttgccgatatggagcttatcggtgtaccacacactgtcgttattggtgaccgtaatcttgataatggcgaagtagaatataaacatcgtcgcaatgatgaaaaacagatgctgaaactagacaatgttgttgattacctgaagcaacaacttggttgttaattaggattattcagtaacttattgaataacgtggtgataatggtcatatcgcaacagagcattttacgctgcttagcccattatcaccattcatactgaagctagaattgtttcttcatattacaagatttcgatttatcgaaatggattttacctgtctgaatcaaggcaggatcaaattgcccatcttccattgaaggacggacgctgtaatagccttcaacttcaacataaaccggcgttccaccttccacaccgacttggtgatagccttgctccaaatccagactttccgttacagcataccgcttacccgtactacaatctgtaaacaaagcagcatcagccatataactgtattcacccgccaatttcttcggttttacccgttgcagttcataattgaatgatgattcaattttattgccttcaatatccagcattaccaggttttcacctttcgacagataataagatttctggtcgtctgattttgtcaggcgaattttctctccatctttcgcccatagaccggattcaaagaacgactggtcaccatcacgagcgccaatataagtttgttccagaatataagtaccgtcattatccaataacagtgtggtatcaataccagaacaatcagcacaaggaagagcaccatgaaaagtctgatctactggctgtgaactcatttgctgtgctgagttacctttacatcccatcaaagcagatacgcccacagcaactaacgctgtcaaaagttttttattcacatttatctccacacagtataatgagctttataattctcatcttataagtaacacaaggaacatagcgattattcaagcttaatagcgtaaatactgtccttcttaaggatgttactcaataatagcaaaataacgtgggccgattttaatacttctgtcaggaacttgctgtgaaataagacttttatttacttactgttcagaatgaataaccaaagttattcattaatcacgattgatttcctgtgctatagtcattaatagtgcttttgagttacaatttttaacaaccacgggcggcaataaccgccactaaccatagtggtgagcgaatatgtctataaatactgaatatcaaccaattaactgtgacgactacgacaatcttgagtcaacttgccaacatcagctccacctccacataaagttgcggggtggggaagttattgaaggaaaagcctgtgatttggttttaagaaaaaaagttgaatacttgatcattgaaacagaaggtaaaccttgtgaattgcggttagatcatattgctagtttcagtcaccctaagattggcactattattattgaaccctctgaatcttgatagaaaacagccgcctttggcggcttaactttttattttaacagcgttttatgccagttcattgttaacatcttccttccttctgccgcttcactttccttggtgacaaaaacacctaacgccgctatcaattgttcgttgtaataaagcaatggaattcgctctctaagccatggagcaaccccaagctcttgccacaattttttactatgccgggagtgttgacgccccacaatacttatcattccctggacaccaaagcgaatagtcactcgttcattatcagccgggacccttacttgaataccgcggtcagcaatattcaattctcctaagcgatccggtaataccaaagtattgcaaatatcccactcaagaatagtctctctcaaagattgccactgaggaaccaaccagagtttttgcttataacggcgtacatcatatttaccaaattgtagccgaggctccgcatcagtacgagccagagctacctcataccaaagccggttaagctgctctcgtgaaggcattttcatcccatggtaaccaaaccaacggcgtaacaaagcatttcgtttagcttctgaacatacagccaaagacacaatacccaaagcaccatcttgggttatcaactctttcaaagactcattcagtaactcatctagaagctgctcttgttcaccacataaacttgcactacgagcagcagctttagggaaatgcgaccaacgttgatttagtaacggcatgatatgtaagcgcagaaaatttctgtcataacgatcatcttgattactatcgtcttcaatccaattcagacgatgtttactggcatacttttccaattcattccggctatagtcaagtaacggacgtaacaataatgtatcagcaaatacagcgattgaaggcatagaagcaagacctgccggaccactacctcgctttaatgccagtaaaaaagtctccgcctgatcatcaagatgttgagctgttaccaaaacttcatctttttgtaattcgctcttgaatacctgatatcgagcatcacgagcagcagcctcaatccccttttgacgagcatctatcgttactcttgcagaatgaaactccacttgccagtcatcacagatcagctgacaatgttcaatccactgatctgcttttaggtttaaaccgtggtgaatatgtattgcccttagttgaattttctgattatgttgattacgccaattaaccaataaatgaagcaaaacagaggaatctagcccaccactgaatccaaccaggattttcttatattcaccaagctgtttagccaaggtgacaaatagtctctcatcaatgtttgccattatagattcaagagttccttagcttgcaataatatgaattcattattatacccgttatctttcaagttgcttctttgttggctgcactcactcaccccagtcacatagttatctatgctcccggggattcgctcccttgccgccgcgatgcatcttgaaatccatagggtatatactttagtaagtttaaaacctctgtcagtcagataatgttcttcactactttcattaacaatatgaaatgataaaaagaagcagaaacagtaaaggatggaagtgactgaaatttatcatttccagtcagttaccatcccttatccaaacaattaattcaaatatcagcaataaccatattgcatcaagcgctgatatcggcggttgactaattcttcagatgtcaaatgatcaagctctgccaggtcaatcaacaactgagctttcaacgacgtggatattgcttcatagtcacgatgagcaccacctaatggctctgaaatcacagtatcgaccaactccaactctttcaaacgaggagcagtgatccccatagcttctgccgccaaaggtgctttttccgcgcttttccacaaaattgaggcacaaccttctggggagataacagaataagtactatattgcagcatattcactttatcaccaacaccaatcgccaatgcaccaccagagccaccttcaccaatcacagtacaaataacaggcacagacaggcgggacatttcacgcaagttgcgagctatcgcctcagattgaccacgttcttctgcaccaaccccaggatatgcaccaggagtatcaatgaaagtaataattggcagtttaaaacgctctgccatttccatcaggcgcaaagctttacgataaccttctggcgctggcataccgaaattacggcgaattttttctttggtttcacggcctttttggtgaccaatcaccatcactggacgtccatcaatacgagccagaccacccacaattgctttgtcatcagcataagcacgatcaccagcaagctcttcaaaatcagtaaaaatatgctgaatatagtccaacgtataaggacgacgtgggtgacgagcaagctgagcaatttgccaggcacctaaatctgaaaagattttgcgagtcaattccagacttttttcccgcaaacgttgtacttcttcatccagatttatatctaatttttcaccttgacggctaactgcggttagcgaatcaattttcgcttccagctcggcaatcggctgttcaaattcaagaaaattcagactcataacattcctaattttagtcaaattctaattctacctgctcattacccagcagagttcgcaaatctgtcagaaggttatccgttggcgttaccctccacgtcgcgccaaatcttaaacgggcgcgggcgtcttccctctggtaataaagatgaaccggtatcgttcccgaacgatgtggttccaatgcactacgaagacggctcaacaattgatcatcaatttgcctgtctgacagcgagatagcaagcccacgcgcatatttttcacgcgcttcactaatatccattaattcacgggctgtcattttaagaccgccattgaaatcatcaaagctgacctgacctgtagcgattaatatccggtcttgttctagcaaatgccgatatttctccaaggcatcggaaaataacataacttctagacgtcctgaacgatcatctaaagtacaaataccaatccggttacctcgtttggttataatcactttggatgccagcaccaaacctatcacagttgttacttgaccgcgtggggttggattcacatcttttaaccgcaatccactagtataacgctcaatttcttttaaataacgggtgataggatgcccagttaaatagagacctagcgtttcccgttcaccatcaagaacaatctgttccggccattgagaaatattggcataagagcgttccacttcttctggcgcttcagctaatacaccaaacatatcagtctgaccagtagcttctgctttagcatgttgatctgccgcttttagcgcatcttccaacgaagacatcagtgctgcacggtgcggccctaaacggtcaaatgcccctgacatgatcagtttttccatcactcggcgatttaacttcttggtgtcaacacgggcacataaatcaaacagttctctaaaataaccatctttctgacgagcttcgatgatcgcttcaatcggcccttcacctacccctttaattgcgccgattccatatacgatctccccatcatcattaacgtggaaatgatacaaaccactattaatatcaggtggtaagattttcagccccatgcgccagcattcatcaatcaacccaacgactttttctgtattatccatatccgcagtcattaccgcagccatgaattcagccgggtaatgcgctttcagccataaagtctgataagaaaccaaggcatacgcagcagagtgagatttattaaatccataaccggcaaacttctctaccaggtcaaagattttcattgccagttcgccattaatacccagtttctttgcaccgtcttcaaaaacagaacgctgcttagccatctcctccggctttttcttacccatcgcccgtcggagcatatctgcaccaccgagagtatatcccgccagcacctgagcaatctgcatcacttgttcttgataaaggatgatgccgtaagttggctccaacacaggctgtagagattcgtgctgccactgtatatctgggtatgagagctcttcccggccatgtttgcggtcaatgaagttatccaccatgcctgactgcaagggacctggacggaataaagcgacaagcgcgatcatatcttcgaagcaatcgggacgcagacgtttaatcagatccttcataccacgggattccagctgaaatactgctgttgtttcagcgcgttgcaacatatcaaagcttttagcatcgttcagcggaatcgctgcaatatcaatcggctctagacctttcttcgttctacgcgcgttgatcatctccaatgcccagttgataatggtcagtgttctcagcccgaggaagtcaaatttcaccaaccctgcatattccacatcatttttatcaaactgagtaaccgggttcaaaccttccgggtcacaatagagaggcgaaaaatcggtgatcttcgttggggcgataaccaccccacccgcatgtttccctgcattacgagtgacaccttccaatttacgcgccatatctatcagtgctttaacttcctcatccgcttcatagatttcaggaagttgtggctcagcggcaaatgctttctccaacgtcataccgggatcaagcggtatcaatttggaaatcctatcaacaaatccgtatggatgccctagcacgcggccaacatcccgaattactgctttcgctgccattgtaccgaatgtaatgatctgagatacggcattacgaccatacatatcagccacatgatcaatcactagatcgcgtttttccatacaaaaatcgacgtcaaaatcgggcatggaaacacgttcagggttaaggaatcgttcaaagagcagatcaaattccaaaggatcgagatcggttatttttagggcataagccaccagagaacctgctcccgaaccacgtcccggaccaacaggaacaccgttgtctttcgaccactgaatgaattccatcacgatcaggaagtagcccgggaatcccatttggttgataacccgaagttcaatatcgagtctctcatcatattcaggacgtttttctgcgcgtactttaggatccgggtagagaaatgctaaacgttcttccaacccttgttgagatctatttatcagataatcttcggtactcatttctcccgtagggaattgcggcaggaaatattcaccaaggcgaatagtgacattacagcgcttagcaatttctacactgttttccagcgcttcaggaatatcagcgaatagctcacacatttcctgctcactacgcagatattgctgagggctgtaatttttcggacgtttaggatcagccaaggtatagccatcatgaatcgctacgcgaatctcatgagcatcgaaatcttcgccatcaatgaaacaaacgtcattagttgcaacaacaggcaggcttttttccgttgccaatgccaccgccgcatgaagataactttcttcatctgcacggccagtacggatcagctccaaataataacagccgggaaaatgttcctgataaaactcaaggcattggtccaccatagcctgattaccacgcaacaagaacttacccacatcccccatacgaccaccggagagcagaattagcccttctttatggtttatcagccattcctgtttaattgtcggaccaatcgcaccatatcccttctgataagcctctgatatcagcaatgtcaggttatggtaacccgtattattgcgcgcaagaatggtcaagctagcgtgctcatcaccaagcagttcactttctacataaaaatcagcaccaataatcggttttattcctgctccatgagcactgccgtaaaatctcaccagcccacacaaattagtaaaatcagtgatcgcaaaagccggcatacctaattgcgcaacctttttcactaaagggctggttttggctaagccatcaatcattgaatagtcgctgtgaacacgtaagtgcacaaaacggggttcggccatatatttatccagatgatattaatttgaagaatagctgtattcagttaacaagtttatttaaggccaattgctctcttaaccggcgcaaaacttttacgatgatgttctgtcgctcccaactgaaccaacttttctaaatgaaatgccgtcgggtagcctttatgcttagcaaatccatattcaggaaacagctgatcaagttcagccatttcccgatctctggtaactttcgccacaatagaagcggcactgatttcagcaaccagtccatcgccttttatcaccgcttgtgccggcataggtaatttagggcaacggttaccatcaatcagcacatattcaggagaaataggcaaattagccacagccctttgcatcgcaagcatagttgcatgcaggatattcaattggtcaatttctgccggttctgcacgccccaaactccagcacaatgctttttctgtaatttccagatacagtgcctcgcggcgtttttcactaagttttttagaatcagccaaaccaactatcggctgcaatggatctaaaataacagccgcagtcacaactgcacccactaacggacctcgaccaacttcatcaactccagcaatcagacttgcctgaggatatataaattccattatttccctgccaattccaacacggcttgtgctgcctgttcgtcagcattacaacgaatgcttttatgcaaatgtaaaaatgtctgtttcaatgctccaactttttcactgccttgtagtaacggcaacaactcatctgcaagtttttgcggctgacatttttcctgcaataattctttaactaactcttcaccggataataagttaggcaatgaaacataaggcgtttttaccaggcgttttgccagccaaaaagtcaatggcttcatccgataaccaactaccattggacactttgccagcatacattccagagcagcagtaccagaggccaaaagtgcggcatcacttgcgatcataatttctctcgctttgccatcgacaagatgaacattcagctctggcgcaacttcttgcttaatgcgctcaaattgttcacgccgtttagcattcaccaacggcacaaatacatgcagatcaggtatgtttcgcttcaataactgagcagttttaagaaaatccgcactcagcatctcaacctcagaatggcgactccccggcaataaagccaagcaaacagactctggcagaatacctaatagctcacgtgccgtcgctttattgggttgcaatggcatagcatccgccatggtatgtccaataaaccggcacggaacattaaatttatcgtaaaacgctttttcaaaaggtaagaaagccagaaccatatctgtggctttaccaattttgaaaacgcgtttctgacgccaagcccataccgacggactaacataatgaatggtgcggatgcctcgctgttttaaccgaccttctaatgtaatattgaaatccggcgcatcgatgcccacaaacacatcaggctttagttccgtgaaacgggttgtcagatccttacgtattttcaacaaacgaggcaaacgtccgagaacttcgacaatccccattactgctagctcttccatctcataccaagcttcacaaccttcagcctgcataagagggcctgctacaccaacaaaacgggcattaggtactttagcttttaatgcacgaattaaacctgctccaaggatatcaccggaagtttctccggcgattaatccaatagtcaacggacgcagactatcaatagaagaaatggtagccaaaggagtatccttcatctacttaacggacgatgccgcgggtagaatttgccagaaaatcgctgaagatttttacatgctgattattttcagccagctcagcaatttcttgttgtgcttcttctaacgtttttccattacgatacaaaatcttgtacgcatttctaattacattcaatgaatctttatcaaaaccacggcgtttcaagccttcgacattagtgccaaaaggtgttgcatgattcccctgagcaataacgtatggcggaatatcctgtaccacaccggaacacccgcccaccatagcatgagagccaatctgacaaaactgatgaatcgcactcataccaccaatgatgacataatcacccaagataacatgcccccccaaagtaccattattagcaatgacacaacggtcaccgacaatacagtcatgagcaatatgggcattaaccatcaacaaattatcattaccgattttcgttacaccgccaccctgcacagtgccacgatgaatggtgacactttcgcggatacggttacgatcaccaatttcaactcgggttggttcaccgtgatatttcaggtcctgattcatttcaccaatagaagcaaactgaaaaatctgattatcacggccgattttggttattccattgacaacaacatgagacttcagctctgtaccttcaccaatttcaacctgagagccaatacaacaaaacggcccaatacgaacattggcaccaataaccgcaccatcttctacaatagcgctaggatgtatataagcggtttcatcaatcatggactaaacctcacgacggcgagcacacatcatttctgcttcgcaagctatttctccatcgactttcgctacgcctctacaacgcgcaacccctcgacgctccttaataaattctacttctaatatcatttgatccccaggcactaccgggcgtttaaagcgggcaccatcgatagcggcaaaataatagagctcatttggctctagcttgcccacactcctaaatgccaggattccggtggcctgtgccatagcttcaaggatcagaacacctgggaaaataggtttgccgggaaaatgcccctgaaagaagggttcgttaaaagatacgttttttactgcacgtaagaatttaccttcctcaaaatcaagcacgcgatccactaataaaaacggataacgatgtggaagtagatctaaaatttcttcaatgtgcagagtatgattatcactcatctaaatactcttcctgtcaaaaggactaattgtattaacgacacggcccgcttaaaccccaaatccagagttcccaggcaggccgcaaaataagacacaaccaaaaatatagtgcaattaaatatagtacaattaaatgtagtacaattaaatatagtgcaattactcgttttcgtcttccagcttactctccattgacttaagacgtttattcatttcattgatattcatgactaaagctgccgtcttacgccaaactttatttggttgtgctggaatcccagaggagtatacaccaggttcagtgatagggcgcatcaccatactcatccccgtgactgttaccttatcacagatttccatatgcccattaatgacactggcaccaccaatcatacagtaacaaccaattttcagactaccggccatgatcacaccgccagcaaccgccgtattgtcaccaatgataacattatgcgcaatctgacactggttatcgataatgacgccattgccaataatggtattatctaaagctcctcgatcaatagttgtacaggcaccaatctcaactcggtcaccaataatgactgaacctaattgagggattttaacccacttgccacgatcattcgcatagccaaaaccatcagacccaatcactgctcctgactggatcaaacactgttcacccatttcaacattatgataaacagagacattcgcccaaagacggcttcctgctccaatacgcgtatttttaccaataaagcagcctgcaccgataacaacattgtcgccaagaacaacgccagattcgataaccgcattggctccgacagcaacgtttttacccaaagttgcctgaggtgaaatcaccgcagaagagtgaatatcctgtgcgggaatcggtgttgtatccataatctgagccatataggcatatgccagataaggattggcgacaaccaacgctggaatattgcaataaggaagatctgacgcctgaagaacgacagcggcagcctgacattcacccaaacgttcacgataacgactgtcagacaaaaaagtgatctgttcgccattggccgaatgcattggtgcaatactggtgataacaatatcgccatcaccatgtaattgtgcattcaactgctgagctaaatcagccaatcgaattgaagacatctgttatttaacctgtttcaatacacttgtagtaatatttttgccagatactgaataagcaacagcattcgcatcaataacgacatcatagccttctttgccagcaaccactttgattgcgtcctgaatacgacttagaattttgttgcgttcttccatctcgcgacgacgatgatcttgttcaaaagcttgggcttttttggcaaattcttcacgcttagccatcacctctttttccagattagtacgttcactggatttcatagtggagccatcacgctgtaatttctggatcttggactgcaagtcagtttccatccgttgcaattcagatgcgcggtttttaaactcattttccaactgcttcacaacagcttcgcgggctggcagctgctggaaaatctcaccaacatttacaacggcaattttgtctgctgcctgagcaccaacagagaaagctaatgcaataccaaagcttgctgcacacaacaattttttcactataaactccttaaaccacgctatctgtaacctattggaaaacttagttaatgctctgaaacctacgatttcagagcttgctctatcaataataagataaaaacgcattatcaccaggttttgccaatattaaattggaattgctctgatctatcaccttcgtaatctttgatcggcttagcataagagaacaccagtggacctaaaggagacacccattgcaatgcaatacccgctgaaacgcggatattacctggtttaccgtaatcaggtataccactgcctttcatcgcagcagaatcattccaataagtatcccaaaccgtacctgaatcaataaagaatgaagttcggacagaattcgaatacttactatcgaggaatggcgtcggagtaatcaactcaaggctggctaccgccattgcgttcccccccacggcatcgcgagatgggctatctttcttagggtcatcttttccattcatataaatcgctttagggccgatattgttagaacggaaaccacgaaccgtactggagccacctgcataaaagttttcatagaatggtaactctttaccgcctaatccatcaccataacctaaacggctgcgccccaagatcacccaagtacgatcgtcattaatcggataatacgcagaggtatcaaaagttactttatagaattcgttatccgaaccaggaatagtcactttaccattcagcgtcgatttcacaccggatgttgggaagaagccacggtcaaggttgttatatgtccaacctacattcaaagcaaagtcatctgctttgaactcagctttacttttataatctggtttctctcccatggaattcaaataacgccacattgcagcctgcggaagcatatcagacagcgagttatgaacataatttaatccaaaacgcagagagttattttcattaatcggaaaaccgaggaaaccatctataccgtagctttggttagtatagccggataattcagcatcatcagccctgaaatcgttgtagaatacccgaccaccaaggctcacaccattaaccgtgaagtacggatcagtgaaggagagctctgcataggttgaataatcgttcttactggcattaacccccacagaattacctgtacccaaccagttatcctgctgagcaccaatctggaaactaacgccactttctgtaccaaaaccaacaccaaagttcaaagagccggtattacgctctttaactttataaacaacatctacctgatcagggctgcctggtacacgctgagtttcaacatctaccgtttcgaaataacccaaacggttaaggcgctctttacccagttcaatcagatcacttcctaaccatgctctttccatctgacgcatttcacgacgcagaacagaatctttagtggtgtcattaccagagaaacgaattttacgaacatagaaacggttacctgcatcaatattgacatgcagttttactgtcttgccttgatcattgatttcaggttgcgtcatcactcgtgggtaagcataaccatagcgaccaagcaagttcttgatgtcattttccattttagtcacctgagtcccgttatacagagatccaggctcaatggcagccagtttagtaatttctgactgataacccgccatattaccgttcaggtcaatacctgatattttgtattgatcaccttcagttatatttatcgtgacataaataccttttttatctggcgtcaaactgacttgagtcgaatcaatgttaaaacgggcataaccgcgatcaaggtaaaaactgcgcaatgcttcaaggtcaccagtcagcttttgtttctgatatttctgatcggcagtcaaattccaccacggcacatcatctctaagttggaaacgattcaataactcatcagaagaaaatgatttattaccaacaatgttaatttgctggatttttgccgagacaccttcagcgaaaaccagttttaaatcgacacggttacgtggaagtggcgtaacaaccgcttttacactggcgttgtatttacccacactgtaatagaaatcctccaaccctctttcgatattggacagcatcgtgcggtcaagggcttcgccgatccgaacatgagatgcctcaaggttttgtttcaacatgtcatctttcaccgatttattgccggagaaagtgatgctggcaatagtcggccgttcttttacttgaacaataagtgtattgctatcacgcaggacacgaacgtcttcaaagttaccagtagcaaatagtgcatgaatggtacgaccgatatcttcatcgctgaccgtatcacctacgcgaactggcatattcagtaatgctgcacctacggcgacgcgttgaagaccctcaaagtgaatgtcctgaactacgaatccgtctgcaccgtatgcagtggcgctgccaaacagcagcgacgctatgagtaactttttcatcgccatcgttgtaatgcgtcttcctaactagtcttccgctttaaaaacgggagaaatcattgaaaagtgcaagccccatcaataacaccagtactatggcaccgatgcgatagctgaagtcttgtacacgctcggaaactggcccaccttttatcttttcgataaacaagaagagcaagtgtccaccatctaacacaggtaatgggatcaaattaataaccccaagattgacacttattagcgccaaaaacatcaaataatacaccaagccggaatcagccgacacccctgcccctttagcgatagagataggtccactcaggttgttaattttcacatcaccaacgatcagcttaccaatcatactgacagttaatcgcatcagttgccaagtcttctctcctgcctgatacatggcagagaaaggcccgtattgctgaacgattctgtattcatcggctaatggcacaactcgcagttccacaccggcaaaaccaactttcctgccaccagactgttgtcttgcttccggcgtcatagagagagaaataatatgaccagcccgatccacggaaagttccagcgggacatttggattattgctgacaaaggatgtaaaagtatgccaaacatctatttcctggtcaccgactttaactatcctatcccccttttgcaaacccgctttttctgctgcggagccagggataactttttccaccagagaatccaaacgaggaccgacgggcataattcctaatgacaacacaggatcctgtttatccggatcaaaactccattgctgcaaatccagagttttctccaccgaatatgatgagcctggagaaataacctgaacagtcatgttatcgtcacctatcttacctaccagagcaaaacgaactgaattccaatcaggcgtttcgataccatctacggattttagttccattcccgatgaaatatttgcttgcgcagcgatagaatctggtttgatatccgcaacaacaggacggattgccggcacaccaataataaacaccaaccaataaaccacagccgccaataaaaagttagcaattggcccggcactgaccaccgcagcacgctgaccaagtgttttattattaaatgccatatgacggtgttcaggagaaacaggtgaaacacgctcatcaagcattttcacatatccccccagtggaataagggctacaacatattcagttccttgacgatctgtacgccgccatagagctttaccaaaaccaatggagaaacgttcaacgtgaataccacactttctggccacccaaaaatggccaaactcatgcacagtgatcaatatccctagcgcaataataaaagccgccagattccagagaattcccatcatattcttcaaacgccgtcaaacatagagatcaaaataccagcaacattaggccagtaaaaacagggatcgcagccgtcaggctatcaatacgatccataacaccgccatgtcccggaattagctggctgctatccttaatacccgattcacgtttgaacatactctctgtcaaatcaccaaatacagaagcgataacaacaatagcagagcacaacatgagtttttcaggcattgcaggtactggagcatatttcccaaacaaccatgaaataatggccgctgtcattaaccccccgattaatccttccagcgtttttcctggagaaactttcggtgccattttacgtttacctaaagtacgtccgaagagataagcgccggaatccgctccccacactagcaacatgacatacagtaaccaccatgcaccataatatgaattatcatcatatccctgagtccgtaacaccatcattccacagtaaaacggcactaatgtcaggacaccaaacaaaaggcgcaataaaatggatctcttccaaattacagcggaagaaggataggtaacaaccagaagcgtcgcaacaatccaccaaatcattcccccccataggataaaagtgatttgaggttgtccaatcaaatcagtgaaatctggcagagtatattgtaaggccaataaaccaatagcaaacagaactgccaaaatagcccgtttcttttggttaaataagccagcgaattgcccccattcccacgcagcaagtgctgaaacagcaataatcaccagcccaaacgctactggtggcagcaaaaacagagcggcaatcacaagagggattaatatcacagccgttataaggcggtacttcagcaagagttcctcctatgatcccacatcggcatcgtctggtattgttccgccaaaccggcgttctcttttggcaaaggcattaattgcaccttcaaaaacgttttcatcaaaatcaggccagagtatatcggtaaaatagaattctgcataagctatctgccataacagaaaattactgatacgatgttcacctccggttctgatgaccaaatcaacctggggctgctggcttagattcatataattattaactaattcttcagtaatatcctgttgctcaagagaattatccttaatctgctgagcaattttctgaacactttgaacaatatcccaacgaccaccataatttgcagcaatattaagttgcagacccgtattattagcggtcaacttaactgagcgatggattcgatcctgtaaacgctcactgaagcggccgatatcaccaataacagataatctaatattatgcttatgtaaacttttgatttcgctatctagtgcaaaaataaataattccattaaagagctgacttcttgttccggccgattccagttttcactactgaaagcgtacaacgtcagtgactcaatgttatgtttagccgagaaactcaccgcactacgtaccgctttaatccctgcacgatgaccaaaggctcttaatttccctcgtttctttgcccaacggccgttaccatccataataatggcaacatgtttaggtaataatgacgataaatcgttctgatgatgatcgctggataatatcactcaattaatcctttgctggtcagggtaattctcttacatgttcaggcatccaaacataaaaaagccgtgtctggtatccacggcctgggtaaaagcctaattatccggaagagaacttccaaaatctgaaccgttaattatatcaaccaacagttatacgcaaactataccatcaggtaaaaatgcggacaaatacccatttgccaatcaaagactatctgataaatgaacgaatagtctttatggctaaatctcttgcgagattatcaatctgtaagacttcctcaatgctctgaggttccgacaaatttagtttttctacaacctgccggtttataattgcaatatctgtgaaagagattccattttgtaaaaaaatcttaacgatttcttcattcgctgcattcaacaccgtcgttgcagcctgacctgcgtggcaagcttcaatagccagtttcaaacatggataccgttcataatctggtttcgagaacgtcagtgtacctaaagaataaaaatcaagaggttcaacaccagaagcaatacgatttgggtatgccattgcataggcaatgggtgtacacatatccggtgttcctaattgagcaataacgctgccatcctgataacggaccatagagtgaataactgactgaggatgaactaccacttccatttccgcagcagatgcattgaacagacaacacgcctcaatatattccagacccttattcatcattgtcgcagaatctaccgaaatcttacgccccatcgaccaattcggatgagcacaagcttggtccggtgttacaaaagctaattgctctaaaggggtatgacgaaaaggcccgccagatcctgtcaaaatgatattagcaattccatattgttttagatctccgcgcccaaggtttcgttgtattacctctggtaagctctggaaaatagcattatgctcactgtcaatgggtaataattgagcattatgtttcgctacagcatccataaaaaaccgaccgctggtgatcagcgactctttattagcaagtaaaatctgtttacccgcccggatggcagccagcgttggcaataaaccagccacaccaacaatcccagacataacctgatcaacatcattcaaagcagccaaatcacacgcagcctgttccccgaaaaatacctcggttttacaaccttgttcaataagcagctgacgcaactcttttgcggaaacttcatctgccattgcagcatattgaggccgaaactccagacattgctcagccataacttggatattttttccagcggcaagcgctgttactttgaatttatcaggattattgcgaactacagtaagtgtacttttgcccacggaacctgtggaaccaaggatggtcaaccttttcatactgatgctctgaattgttttatttgatgtgtattgatacttgtctgattcgcctggctatgaacgctcatgacctcagagaaatgccgaataaaaatagcgccacaagatagcggcgcttgatatacccgtcatctttcaagttgcctctttgttggctgcactcactcaccccggtcacagagttatctctgctcccgggaattcgctcccttgccgccgcgaagcatcttgaaatccataaggtatatatctcatgaaagagattagaactccatcagttcttcttctttctttgttaaagcttcatcaacttttttgatgaaattatccgtcagcttttgaatatcatcctgcgcacgacgctcatcatcttcactgatctctttgtctttcagcagtgctttgattttgtcgttagcgtcacgacgaatattacgtacagagacacgcccctgctcagcttcgctacgaaccaccttaatcagatctttacgacgctcttctgtcaatggtggtaaaggaacacgaattgttgtccccgcagaagatggattcagccctaaatcagaagccatgattgccttttcaatcgccggcgtcatagtacgatcaaataccgtgatagccaaggtacgtgcatcctcagcgatgacgttagcaagctgacgcaaaggcgttggtgcaccataatactcaacaatgataccatccagcagactaggagaagctcggccagtacgaaccttgctgatttggtttttaagtgcttcgacgctcttttccatacggtcttgtgcgtcttttttgatttcattaatcacgttacaaacccttgggaactggttgttttaaagccataagctattatgaccatgtttgttaaatttggcgtatcaggcgactcatcataccgccaaacatctctggtgtctttgaacattactcgtgaaaaatcagggtgccttcattttctcccattaccacacgacgcaacgctcccggcttattcatgttaaatacgcgaatgggtaagctgtgatcacgagccaacgtgaatgccgccaaatccataactttcaattcacgctctaatacctgctggtaagagagcttatcgaacaataccgcttccgaatctttagccggatcagccgagtaaacaccatctactttagttgcttttagcacaacatctgcttcaatctcaataccacgcaaacacgctgccgaatctgtagtaaagaacggattgccggtacccgcagagaaaataacaacacgaccatgacgtaataaactaattgcttctgcccaactatagttatcgcaaacgccatttaaaggaatcgcagacattagacgggcgttcacataggcgcgatgtaatgcgtcccgcattgccagaccattcatcactgttgccaacatgcccatgtggtcgccgactacacggttcatccctgcttctgccaagccagcaccacgaaacagattaccaccgccaatgacgacaccgacttctacgcctaactcaaccagttctttgacctcctgagccatgcgatctaacacgctggcatctataccaaaaccttctgcaccttgcagggcttctccactgagtttaagcaggatacgctgatatacgggttttgcattggttgccatgatgttctgtcctaagcagaaaagtatattgggggatttacatacatccgggccattctggccagatgcaaaaactcaacacctactgggataggcggtttagattagataaaacagaaccgccatttggcggccctgtttgtaaaaattaagactatttactcattgcagcaacttctgctgcgaaatcagtctcaactttctcaataccttcacccacttcataacggatgaaactggtcactgtagcattgttttctttcaatagatcgccaactgttttgcttggatccatcacgaaattctgacctgtcagagaaatctcaccagtgaatttattcatacgaccagaaaccattttctctgcgatttcgcgtggcttgccagactgcattgcgatatccagttggatttggtgctcacgatcaacaacatcagccggtacatcacttgggttaacatattctggcttgcttgcggcgatgtgcatagccacatgcttaatcagctcttcattagcgccttcagccgcaaccagaacaccgatacgtgcaccatgcagataagtacccagttgttcaccttctaatacagaaacgcgacgaatgttaatgttttcaccgatcttagcaaccagtgcagtacgctgttcttcaaacttagctttcagagtttcaatatcagagattttatcagccaatactgttgccataacttctttaccgaaagcgatgaagcctgcatctttggcaacgaagtcagtttcacagttcagttcaaccagagcgccgaatttgccatcagcagccacttccgccaagatgataccttcagcagcaacacggccagctttcttagccgctttcgcttgacctgatttacgcatgttgtcaatcgctaattcgatatcaccattagcttcaaccagcgcttttttacattccatcatacctgcgccagtacgctcacgcagttcttttaccaaagcagcggtaattccagacatttgttttattcctcgatgtatcccgcaggaagagagtattccgcatggatagttcttatatcagatacgtaaaagggggccataacaggcccccctaaccaatatatttcaatacctggttaataagggctcaataatgagcttgccttattattcagcttctacaaagctttcttctgcctgaacagccagatcttgagaacgaccttcacgaacagcagtagcaacagcacctagatacagttttactgcacggattgcgtcatcattaccagggatgatgaaatcaacaccatctggatcagagttagtatcaacaacagcgaataccgggatacccaggttgtttgcttctttgatagcaatgtgttcatgttcagcatcgataacaaacagagcatcaggtaagccgcccatatctttgataccgcccagactattttctaacttaccaagttcacgagaacgaattaacgcttctttcttggtcagtttgtcaaaagtaccgtcctgagactgtgcttctaaatctttcaaacgtttgatggattgacgaacggttttccagttagtcagcataccgcccaaccaacggtgattaacgaagaattgatcacagttctgagctgcttctttaaccgcttcgctcgcagcacgcttagtaccaacaaacagaattttgcctttgcgtgaagcaattttgttcagttcagctaacgcatcgttgaacattggaacagttttttccaggttgatgatatgcactttgttacgagcaccaaagatgaatggtttcatttttgggttccagtaacgagtctggtgaccgaagtgaacgcccgcttgcagcatatcgcgcatggaaacagttgccattgtaaacctctgtaaaatattaagttggggttatgcctccacgagccccataacaccgactctttagctgcatgttctgcatgagagcaccccggtgtatgtgccgacccgtgtgtgttatttacacagtgagtatgtttaacgccactctgttttgcctcagtggcaaagacatagaacgccggcgcgctttatatcataaacccgcctaagacaccaacttttgttgccattttctgatagctcaatgtgaaaagaaaagcccggttacgaacggtattcttgatgggtaaataaaggtaacgagggaaatagggctgccaactgttattggcagatattctgtaggctgataccattagttcaataattttttccttgttgaaaaacagacaaccagcagattcgctggttttgaatggataagtttcatggcaatctcaattaaaacctctgaagatattaaaaaaatgcgcgtcgccggtcggctggcggcagaagtgttagaaattattgaaccttacgtcaaacccggtgtaacaacaggtgaattagatcgtatctgtcacgatcacattaccaataaacaacaggctgtctctgcctgccttggttatcacggtttcccaaaatctgtttgtatctctgttaatgacgtagtgtgtcatggtatccctagtgatgataagaccttgaaagatggcgatattgttaatatcgatgtgactgtcatcaaagagggcttccacggtgatacatcaaaaatgttcatagttggtaaaccaaccattcagggtgagcgcttgtgccgcatcactcaggaaagcctctatctagccttgaaaatggtgaaacccggtattcgtctgcgcaccctcggtagagccatccaacaatttgttgaagccaacgatttttctgtggtccgtgaatattgtggtcacggcatcggcgcaggcttccacgaggaaccacaagtactgcactatgatgcagatgatagtggtgttgttctgcaaaaagggatggctttcactattgagccaatggttaacaccggtgactaccacatccgtaccatgaaagatggctggacagtcaaaaccaaggaccgcagcctgtctgcacagtatgaacatacgattgttgttactgataacggctgtgaaatcatgacattgcgtaaagaagaagagccagcactttcctcagtattagtaaatgaataattaaaacagtaaacgatgaagccttgttgaaatcatacaaggctactcatctctcctccgcaatatccccttgttcaacaccctactttctcagtaatctgactgttatgattcgcctttctcataggtttatacttatgtcagcagatatcgccacaattcaagcccctattccaccactttcccccgctgatttttctagtgaagatcttcgctaccctgtgttgaaacagcacctcgaagaatttcagctttggctggaacatgcatttaaagcgggtatttccgcagaagccttgatttctgcacgcagtgattacatagaccagttgttacagcaattatggtatgcctatagatttgataaaatttcatcactttcattgattgccgtcggcggatatggccggcgggaactgcatccgctatctgacattgacgtgctgatactcagtgaacaaccactcacaccgcctcaagctcagaatgtcgggcaatttatcactttactatgggatatccgactggaagtcggccacagtgttcgcacacttgaagagtgtttgctggaagggttatcagatctgactattgcgacgaatttaatcgaatcacggttaatttgtggcgattcctccatttttcttcgattacagcgacataccttcagtgatggtttttggccttccactgaattctttgatgccaaaattgtcgaacaacacgaacgccatcagcgctatcacagcaccagttataacctggaacctgatatcaaaagcagccccggaggattgcgagacattcataccttactatgggttgcccgccgccattttggtgcaacctccatagatgaaatggtcgattttggtttcctgacagcagaagaacgtaatgaattaaatgaatgccaaagcttcctctggcgtatccgctttgctcttcatctggtagtcaatcgttatgataatcgcctgttatttgatcgccagttcagtattgctcaattactaggctatcacggagaacgtaatcaaccggtagaacgaatgatgaaagatttctaccggatgacacgccgcgttagcgaacttaacaatatgctactgcaactgtttgatgaagccattctggcattggaaaccaatgaaaaatcccgctcgctggatagtgaattccagctacgggggcaacttattgatctcatcgatgaaaccctgtttatcaaagaacccgcagctattatgcgaatgttttatcgcatggcggaacatgaagaagttcaaggtatttattctactacgttacgccacctccgttatgcacgccgcaacttgtctcagccattgtgtgaattaccggaagctcgccaaatctttatggacatcctacgtcacccaagagcagttgaaagcgcatttgtacccatgcatcgccacagtgtccttggcgcttacacaccgctttggggcaatatcgtcggtcagatgcagtttgatctgtttcacgcctataccgtggatgaacataccatccgcgtactgagaaaactggaaagttttgccaatgaaaataatcgtccagcccatccactctgtgttgagctataccctcgtctgcctcaaccagagcttctacatcttgctgcactatttcatgatatcgccaaagggcgtaccggcgaccattctgaacttggcgctgacgatgcgctagcgttttcactgaaacatgggcttaactcacgagaagctgatttggtagcctggctagttcgtcatcatctattaatgtcagtcacagctcaacggcgagatattcaggatccagaaatcatcaagcaatttacccatcaaatcctcaatgaaacccggttacgttacctgatctgcctgacagtcgctgatatctgcgccaccaatgtcaacctatggaatagttggaagcaaagtttgttacgggaactctatttctctacagagaatcaattgcgccagggaaatacgccagattttcgggaacgcatccgacataaccgttttcaggcacttgctctgttgcgccaagataatattaacgaacagaagcttcatcagctttggagtcgttgtcatgcagattattttcttcggcatacgccaaaacaacttgcctggcacgcccatcatctcgtgcagcatgattctcaagagtcactgatactaataagtaccaagccaacccgcggcggtacagaaatttttatctggagcgtagatcgtccttccttgtttgcggcggttgtcggcgaactggatagacgtaacctgagtgttcatcatgctcagatctttaccaatcgtgatggtatgacaatggacactttcgtggtactggaacccaatggtcatcctttagcatcagatcgccatgaaataatacgtaacgcacttttacaagttgttctagctccccataccaaaacaccgaaaacacgaaaattgccaaccaaactgcgtcacttcaacgtaccaacaaaagtcaccttcttacctacccataacgaacgacgaacctatatggaactatttgccctggatcaaccggggttgctggcaagggtcggtaatattttcgccgaaatgggggtttcactgcatggtgcacatatcaccaccatcggtgaacgtgtcgaagattttttcgttctggcggataaagaccataaagcattaaataaaaaagtcagagaagaattatcagaaaggttgacagcaaccctaaatccaaaggataaaatataactcaatatataccctatggatttcaagatgcatcgcggcggcaagggagcgaatccccgggagcagagataactctgtgaccggggtgagtaagtgcagccaacaaagaggcaacttgaaagatgacgggtataagcccatgattcggacgataaccaaggaaccgatgcaatgcagcaattacaatccattatcgaaagtgcatttgaaaaccgcgcaacgcttactccagcaactgtcaaccatgaaacacgtgatgctgttactcaagtcatcaacctgctggatagtggaaaactgcgcgttgcagagaaaattgacggtcagtgggtcactcatcaatggctaaaaatggctgtactgctctctttccgtattaatgaaaatcagatcatcgatggcacagaaagccgttatttcgataaagtcccgatgaaattctctgactatgatcagacaagatttgaaaaagagggctttcgtgtagtgcctcctgcggcagcacgtcaaggggcctttattgcccgtaactgcgtactgatgccttcctatgtcaacatcggcgcttatgttgatgaaggaacaatggtagatacttggacaacagtcggctcctgtgcccaaattggtaaaaatgtccatttatctggtggtgtcggcatcggcggcgtattagaaccattgcaagcgaacccaaccattattgaagacaactgctttattggtgcccgttctgaaattgtagaaggtgtgattatcgaagagggttcagtgatttcaatgggtgtttatattggtcaaagcaccaaaatctatgatcgtgaaacaggagaaatccattatggtcgagtccctgcgggttctgttgttgtctctggcaacctcccatcaaaagatggtagttacagcctgtattgtgctgtcattgtcaaaaaagtggatgccaaaacacaaggaaaagtgggcattaatgaactactcagatcgatagattaaactttaaaatagcggataataaataagtccgctatttttttgctttttatcatcattaccgacctcagttagtgttattaatataagcagtttgaatacggacaacgtgtacgctccgaaacatatacagagtacgtaaggtattcggagacgatccggattcaaaatgacgcatagaataacctactgggaaaaatacccttaaggtggtgccatgtacgataacttaaagagtctggggatcacatatcccgaagaaattgaccgctatagtctgcgtcaagaagctaacaacgatattctgaaaatctattttcgtaaggataaaggtgaattctttgctaaaagcgtgaaattcaaatatccgcgccagcgcaaaactgtgactgcaaacaatgcagagcaaggatacaaagagatcaacgaaatcaataccaacctgcgttatgtgattgaagagttggatcagatttgcaaacgtgaccaagtagaaatcgacttgaaacacaaaatcctcgatgacctacgtcatcttgaacacgttgttgccaacaaaattgccgagattgaagccgatctggaaaaactaacccgtaaataaaacagttctattaattacaccgcttatatcctattcgatataagcggtgtattgtaattattcaattaattctccccattgcctgatccaaggctgagcaaaaacttccggttcagcttcttccactgcatccaccatcaaaacttcaccgattcttattgctccttgctcttgaagcaactcatcaaaagtgcggccaccaccacaaaaattctcgtaactgctatcacccaaagcgatcacgccatagcgtaattctggctgatacccctgctcatctcgcaaagcatagtaaagaggccgaatattatcaggcaaatccccttgcccggttgttgaagtgataactaaaaccatttgatcaagataggattgccactgttccagctccccttcttcaaagacttctacatcatgaccttgttgttcaaggatctgctgtgcttcttctgcgacagcaagcgcgttaccataaacagtaccaacaaaaatacctatctttgccataattattatctctttttaaaggaattattagttatcctcgctggcaacagcagaaaactcaacccttcccaaatcagggataattacctttaccagctaagtcgtcgtatcaaatcaaatattgccactattaagttcactctgtcatgtaaacaggatcgtgactgctccccgccgtaaagacgtcgtcttaaatcaagttatttaatcaataataattcagtgttaaaatcacttttttaaacaactttagttgatgatattgatattaatatgaaaaatgactatatccttttcttcaagatcaataatagcataatgagattaatagaatggcaaaaataagcactaaataaggaaaaccatcaccatgtttaacaatagagctgttgtgctaagtatactattaagtgccgcaaatattaccgtctcatctggcctgatgatttgggtagataccgtgcttaaagatggaagcatgattttaaacgcttatattcctgttttttcctatttattggggttatctctgggatgtatgaccgtatccttttttattcgaaaaatgaatatttctttttttgaaagaaatatttttggcttctttttattactaacaacgataaactgcattctctttgcaaaagaaacaacatttattccagtttggctggatactccgcatagaatattatggggagtaataagtggatttattgttataatgggaagaaatattcttataaccgcaggcaatgaaaagaaaacgaatagtgatttttctattttaagcctggcgttattaagcctgccattttcaattcccgttattttctctcttttaggtttaaattcccgtacatcagcagatttttttgctgcttttatttattctattgcttcaattatctatttcactggctttaaaagctatatggttcccctgtgcaattggcatcatgaaaatcattaaatccgcacttttaaccaaaagaatcatggtaggtaatatcatgcaattattttccctcggattctgtttacttggcattatgataaattctggcatactctatttactattcacaattatggtatttttagctaataccattatgcaacctgtttttttctcttatctaggattacattcaaaaaactctctttatactttgggtatgcagtcagggatttatgtctttattactatgatcatccttttttatactatttatttaggtgttggcattgaagaaatcattgctggatttacaatattatttatctcttcaatagttatctcgactatttttctttcaataatcaattcaaataataatataatcagcaaaaaccaataaatttatatattatcaacctttgctaataatatattaatattgcctttatctcttaattaaaataattaagagataaaggcaacaggtattctttgaaaatatcctaatctataaaattttctatcttactcgcttcatcatattccaaatcggggataataccttgccagccaaattgttgtattaaatgctgccatgatgcatcccattttgccgtaagcgataatttctcccccgtaacaggatgatccaactcaagataactggcatgaagcattaaccggctggtttgataatgaacagcaacgcctctgttttgccgtaaatcgccatgtgttgtatcaccaataatggggtgacgaatatgtgccatatggcgtcttaattgatgttttcgacctgttttcggtgtcaattccaacaaactaaaacgtgatgtaggataacgacctatttctaccggacactccaccgttgccagtggtcggtaataagtcacgcaggattgggcctctttatcaccctctgcaaatttatcggcgatcttatccagctcctcaaccaaagcgtaatcaataatagctgattccaacacataaccgcgcacgacagcatgataagttttttgtaattgatgatgttcaaactgttgagagagctggcgagcaacatcgctggaaagcgccatcagcaatacgccagacgttggtctatccagacggtgtaccggaaaaacatgctgaccaatctgatcacgcaatgtctgcataacaaagaccgtttcatgacgcgccaaccagctacgatgaactaaccaccccgctggcttgttaactgccacaatatgatcatcctggtataacacttccaacatatcagacgttatcctgcataaataagcgatccaacgcacgaagatgttcaaacagttgctggtaacgcccggtagtatcttctttataagactcctcaaagtaaggcgcgatagcaaatgccgtaggcaacgccaatccctgctccaacaatgcatacattctcggaatcaatacccactgcaaccactcttcagctaacatccgatcaatggaaaacggctcaacactttcgaaagcttccggtttgggcggatggctctgccacaggtcaatttccctcatggcttcttcaattaactgtaatttatgcagaatttgttttgcagtactcatattttcagcctgactcagtttttactcaaaacaacccagttagcaagaataccatcgataccccttaagctgaaaatttgcttgctccagtgaataagagaagggagcgcacaagcgctccccttaagttgattttatagcaatcccgctaataatatgctccctgctcactccttgacaaattgtccctaattggttatccgttacccatcattttatttatgttgcatacgatcctgttatgcatttgtcatcctgaccatcatcactcatctgtccttgagaaattgtgcgcaatgattcctttcctgctgaggacagaatgaattaattcattcgatgaaacaagctacacataatggaaccagtaagtcaggacagaaaacaaaatctgtgattatttatagcctattgaaataaaatgaaaataataaactaatgtgaaactcacaaaagtaaacaatgatatctcttacatgaagtgtaagagatatctcacaaaggcagcgttaaaaatcggggcctaacgcataaagacaggctcaattgcgccaagaaacccaactaagtcggtaaataagcgctctcgtttatgactgccaaactgttccaagatcacttcaccggtcaaattacacagagaaatgatacccatatcatctgattccatcgtcgcaataaatgccgttggcgacagtttcagccgtttctgcgtcactaaatgtcctatcaggttttcctgtaaacggataaaatcatcctcactccaaacctgaatcaaactaagccgttgaccttcaaacgttaccgtcatatcaccggccaattgtgatgtataaaaatcatgaattgccggttgtaattgaatatccagtgcaacttcgacgctattcaacttttcctctaaaggaaaaggctgtggcagccaataaacgatgttgtcaccagtctgggtaatacaaggtgatggcacaccataaagttcacggctggcaggaggggccccggtttccttttgccacaaatcaacataacaacgggtaaaattagacaacgcttctgtaacattagaaatcatattattttcaaccggtaactgttaggggtgattatcatgtcatggtaaaccaaatataatgaattgagcgcataaataaaattcagacaaacgcgctaacttgctaaacttaagccatcactactatcagattttgaggaataacatgtcattatatcgggatcaccaagctcttgagcagcttacgctaggtaaaaccactttatatcgtgaccaatatgatgccagcttattgcaagctgtaccccgcaatatgaaccgtgaaccgctggaaattttccctgataatttgccgtttcatggcgctgatatctggacactgtatgagctgtcatggctgaataaccgcggtttgccacaagttgctgtcgggcatgttagtttaaatgcagcaagcacaaacctgattgaatctaaaagttttaagctctatctgaacagctttaatcagactcgttttgaaaactggcaagccgtcgaagaaacactacagcgcgatctggctgcttgtgctgaaggtgaggtggaagtggcacttcatcacttagatcatttcaataatcagccaatctccacttttacaggtgaatgtattgatgatcaggacattgaagtgactgaatatgatttcaatcgtcattatctgcaaaatgcagcgcaaggcccgcaggtagaagaagttttggttagccatctgctgaaatctaattgcctgatcactcatcaacctgactggggatctgtccagattcactacaaagggtcaaaaatcaatcgggaagcattgttacgttacttgatatcattccggcatcacaatgagtttcacgagcaatgtgtcgagcgtatcttcagcgatttacaacaattatgtgcacccgaaaagctctcagtctacgctcgttatacccgtcgtggggggctagatatcaatccgtggcgtacaaatagtgaaggctttgttccagcaacaggccgattggcacgtcaataaatccattttaaatctgctttcctaagcgcaatttgtgaaaaataagctgaaatagggcatgtaatacattcagtttagtgatattgatatgtaatccatacacggtatacaaggagtcattcttgatcacacatatcaacccactcggctcgatggatttattatctcaacttgaagtagatatgctaaagagtaccgcaaaaagtgatctgtatcgcctgttccgtaattgctcactggccgtactcaattcaggtagccaaaccgataatagcaaagagctgctctctaaatacaccgattttgagattaacgtattgcgccgtgagcgcggggtaaaactggagctggtggatccaccagaagatgcattcgttgatggaaaaattattcattcactacaagctaacctgttcgcagtgctgcgggatatcttgttcgttcatacacagattaccgatccagaacaacaggattattccgattcagagaatagcgcgtatatcaccaacagaatattctctattctgcgccacgccagagcactgcataccgatgaagatctcaacatgatcgtctgttggggaggccactcaattagtaagcaagagtatcagtatggccgtaaagtcggtaatcaacttgggttacgtggactgaatatctgtaccggctgtggccccggagcaatggaagcaccaatgaaaggcgcggctgtcggccatgcccaacagaattacaaaaatagccgttttattggtattaccgagccttcaatcattgcggctgaacccccaaatccattagtgaacgagctaattatcatgccagacatcgaaaaacgtctggaagcttttgttcgtattgctcatggtatcgttattttcccaggtggtgttggtacagcagaagaattactttatttgctaggtattctgatgaatccagaaaatcaggagcaaatactgccattgattcttaccggaccgaagcagagtgaagcctatttccaagttctggacgaatttattgttcatacattgggcaaagagactcgacgctattatcacatcatcattgataatgcgcctgaagttgccagaataatgaaaaaagcgatgccattagtgagagataatcgccacagtaccggtgatgcatacagttttaattggtcaatgaagatcaattatgatttgcaacaaccgtttgaaccatcacatgaaaacatggctaacctcaatctctatcctgatcagtcacctgaaaaactggcagcgtcattgcgccgggctttttccggaattgttgcaggcaatgtaaaagagatgggtattcaatcgattgaacaacaaggtccattcaaaatccacggggatgttaaaataatgcgccatatggataagctactgaaagactttgtggaacagcaccgaatgaaactaccgggaggtactgcctacgaaccttgctacgaaatcatcaaataaaattatctgaaaaaatatccacgctccacggatggagcattatgttatttaaagtgatcccatatgatacaccttcttattgttgatgctcttaaccttatccgacgcattcatgctgtacagggcagcccatgcattcctgcttgtgaacatgcgctaaggcaacttatccaacattctcatcccacacatgccgtcgcagtattcgatgaagagaatcgcaatcacagttggcgtcaccagatattacctgactacaaagctggtcgttcacccatgcctgacaatctgcaacaagaaatgccgcaaatcagagcgtcgtttgagcaacaaggagtcacttgctggcatgccaaagggcatgaagctgatgatctggcagcaacactggcagtaaaagtcactgcggccggtcacaacgtaacgattgtttctactgataaaggctattgccaattactttcacccaatatccgtatccgtgattacttccagaaacgctggttggatatgccctttgttcaacaagaatttggggttttaccggaacaattgcctgattattgggggctggcggggatcagtagcagtaaaattccggggatccaggggatcggcccgaaaaccgctgccactttactgcaacaggccggtacactggataatctgttccaacacctcgaccaacaacccgagaaatggcgcaataaactagaatccaatcaagaaatcgcgtttatcagccgggaagttgcgtcattacgtaccgatctggctttaaagggtaatttgcaacaactccggctgacaatagcaacctaacgaaaatacttcgctaccttatccagatgttcgccttttaattctccggcctcactaagcaggccgatccaagccttaatataattatattttgcttgtgagagatcacgtcgggcagtatataactgctgttcagcattcaagacatccacattaacccgctgcccaagcgcaacgcttttactggttgcgtctacctgtaagctagctgattcaaccgccatttcataagcactaattcttttttcactatttaagtactgattataattgcggcgtaatgcattaaggatttctcccgcctgagcatcaagatcatatttagtcctgccatagtgggccgccgcctgacgtacagcggcagacgtagcaccaccattatagatattcatgctcatccgcaagccaatggtatcggtgcgatatttttgatctatggtattatcgctgctggattcgttttcagagtgggaagcgtacaactccagcctaggtaaatagcccgcccgattacgttgcacttcatggtacgcggctttcacttcctgacgcgaagcggacagaagcggattgttggctaatgccaactcttcccacgcctcataacgttcaggtaacaacttcaatatctggaatcgttttttatttgataaccgttgcaccggtaaatcaaccgggagagaaacccccacaatgagctgtaaatttcggattgctgcatccaaatcatctttggccgctatctcatcggcaatcgcctgactgtaacgcgattgtgtttctaccacatcagtgagcgtcccttcaccagaagtaaacaacttcttattcagttccagttgtttttcataagccattttctgccgtatgactaaatcaatctgatcctgtgcataagccacatctacgtaagcattcacgacccgaacagccaattgctgaaaatctgcccgaaaacgctcattgctcatcaaagtgtgagcctggctggctttataacgcgcccatatttcaaaatcgatcaacggctgagtcaacacaacagccgcgctataactgcgatattggcgatcctggctttcggttgtcttcccgccccgcaagttatacctgggatactccgtatgttgccaattcttcggtgactgctggtaagacattatcaccttaggcaacaagtctgccctgccgatcttttcatgttcctcaccgccttcccgctctttcacggcggcgagaaaaatcggatcattttctaacgccagcgcataaacttcagtcaaactcaatgcccatgcaggaaaagagaacagattgacacagacaagaatcagcaaacccattgataaagaagcattattccgtttcatcattactcctctatcaacgatgttgaagcccgatccagcaatggcttaaacagataacttaacagagagcgggaacccgtcttgacaaaaacctcaaccggcattcctggcctgatatccaaccctttcagtttttccattccctcaggagagacaaccactctcatctgataataaggttgactggttgcgggatcgaccaacctatctgcggaaatcacggcaacttttccttcaacttttggcgtccgattctggttaaaagcggtaaacatcagatccacattcaaccctttactaatcttatctgccaaattaaccgcaacacgcgtttccacttcaaacgccctctggtccggcagaatttccatcagtttttcgccgggagcaacaacccccccttgggtaaaaatatttaatcccacaacagtgccatcaaccggcgcaacaattgaggtatgagtcagttcaaactgggctgtatccagcttatttctatattcactggcagagacctgcacctcggctaattgtgtgcgcacttcccgctgatagtctgctttgcgctgaataatacgctgctgtgtttcctgtaattgtttttcaagctgaccggctcgtccttccatttccgctatgctgctgttgagctcagcctgttcacgcagcagttccagataacgattacgcggaaaatagccctcatccgctaaagatttcagattagttatttgctctttaagcgccgcctgctgcatgcgtttattgagaaaagaagatttcagccctttaatttggaaatctattccttcgacagactgctcaagccctgccaagtcgcttctcagcacttcacggcgtgatacaaacagttgcttttgcagttcaataatctcattcacccgcggttcagagtgtaattgctgtaataggtcggggaaaattaacgcttcatcaccatgctgctcggctaataaacgggcttccgttgccagcgtggtatgcagttgatcttgaagtgcatcaacctgtgcctttgcctgcacctgactgagctggacgagtgtctgacccgcttttactgtttcgccttcaacaaccttaatctgactgataatcccgcttgccggggcctgaactgttttacgattaccatccaccaccaccacacctgaagatgccacccctttatctaacggtgctaacgcggcccaaatgagaaatcccaggatccccacaccaatcacgaaccatcctagtcgtaaaaaatgcctttcttccaaaggcaataatcctttttcctctcttaccggcgtaatctgatcagacatatccactcccggacagaaatctccgtctcagctatttgatattattataattaaatgcacatttacctatgatgcctgggcgactgccttggttgcagaatgttcctgactattattcctttgtgataaagcggccatcacctgttgagatgaaccgaacatcttcattttcccctgaaccagtagcaatattttgtttgtctgtgatagcaatgaggtgcggtgagtaatcacaatcactgtctttccttgtgcctttaactgagaaatcgcctcattcaatgctctttcccctgcctcatccaggctggaattaggctcatccaacaccaccaatgacggctcgtcatatagcgcacgagcaaggccaatgcgctgtttctgcccaccagataatcccactccgccagcaccaatcacggtgtcatagcccttatcaagtgctaatatcagctcatgaacacccgctttctttgccgcctgaaccaccttttcgggttctactgcattaaaacgggcaatattttcagcaatagtgccgccaaatagctcaatatcttgcggtaaataaccgattgaggagcccagttcatctttattccactgataaatatcggcattatccagacgaacaacgccttcctgtgtcggccatattccgaccagtaaccgggcaagcgtcgatttcccagacgcactgggaccaattaatcccatcacatcaccggcatccaacgagaagctaatatcctgcaaaacaaccttactgtttcttcccggcggcgctgcggaaactttatccacggctaaatttccttttggcgcaggcaatgacatgcccggtttgcgttccggttgttgttccaacaggtgggttaaccgttgccatgacaaacgagcaccactccagcctttccaggcttggatcaattgttcaatcggtgaaagtgcacgtcccatcaaaattgaagccgcaatcatcatgcccggcgtaatatgcccaccaatcgctaaccagccccctaatcccaggatcagtgactgcaaggccaaacgcactgttttagtgactgaattaatcactgaagcccgctcactcgcaatgcgctggaaatccaggaaacgctcatgtaatccaaaccatctccgacgtagcaccggcaacatccctaacgcctctatgacttcggcattacgtaaattagtgctggcaagacttgctgaacgtagagagagtttactggcttcggataacggctgacttgataaccattgattcaacacagccagggcaatcaataccagtgcaccgcccaatgacaacagaccaagccaggggttaaaaagaaaaataaccagcagatagattggaaaccaaggggcatcaaagaaggcaaacaaggcgttacccgtcaaaaactggcggatattggctaaatcattgagcatctgaccggcatcagtcgtgccatttttcagattcgattcataagatgcggtataaacccggttattcagcttcatatcaagctggctgccaatacggataacaatcatgctacggatatattccagcatgcccatcatggcaaacatgccgagggtaatcagcgtcaacatcagcaaagtgatttcattgcccgacggcaatactctgtcataaacctgcaacatataaacagatggaactaacatcagcaggttaataaaagcagtgaacaacccgatagcccaaaatacccgactacgagcacgaatgacatcagtaatttcatcctttgggagtagtaatttcacattatttccttatttttattttttaaaaatataactatctgatgttaatgtttcctgctttattcatttttcttactcgtcttattgggctttatcattaattcccgaccatcggcaaaacgagcaaaccaaccatccggttcatgagcaaaaaaagccaaaccactcccctgttcatcagtaattgtgagcccatctggtgttggtcgccaaccggcaggcacttcgccaaacatatacgctaaacaatcgttatcaccattaagtgaccaaattgatccctctggtaagggatggtcagtcaataacacatcgcattgttgatgtttatccgacaattgccacacgcctttcaattcactggcgtgtgggagaacaagactactcgccatacttcctccgataatgctgaatataagagcaacaaagcctgcaaatttcagataccaagccgcaaaaaccacgccgcctccaaacaaataaccgcatccaaaatcagatgcggttgtgttgttgtgttatgaaagaatgaaatcagactctaagattggctctccgactatcttcacccaaaaatcatcgtaggaaaattcaccgcccaaattaatggcgaaatcattcaccttatcaaccgtgttataacgaagcaccgcttctccgacttcacccgtgaattcccttacaaatttaacgccccccttcccggcttcacccagatcgaacagtgacacatcgatcttgtctttaccggaaacaaagtcatggatccaatcacgctcaagaggcggtgattccttggcgctcaggtagacaaaggtatcgttgccctccccgccccaaagattatccgctcccaagccgccgtaaatgatgtcatcacccgctccacctttcagagtattggcggcatcattcccgattaaaacgtcattaccactgccaccaattgcattttcaatcgtgacgccacgggcaatagagacgttccctttcaacccaccgacatcagagaaagacgcttcattcagattgatacgttgatcctgagtaaatccagagaaatcaaacgtatcattccccccggtatcccaagcggtgaacaacagtttgctgttctcgtcttttgcggtatagaagtcacgatctgtgttggaattaaaaccatatacggtgtcatcagcacggatggtattattcgcgccgtataccgcctgaatggcagaaatatcgttaagtaatggtgcggaagaataaatacctttaaagtcctgaccggtatttttctcaccaaaataactcatgacggtataagcacggctatcttcaaaataagtcgcactgttcttataagtcgggcttaccttgtcagacgcattataatcagccggatgttgcaaccctagagtgtggccaatttcatgagtaaacgtctgacggccataaccattcacgtcaatatcgttgtttaagaaagtacggcttttcgcgttataccaagttcctacctgtgtcttctcgggggttggcagataagcaaacgcataactccccgtcaagctaacatcaaagaatccaaaggtaacatttgcctctttggcgtcagtggtttcaacgaaattaatattagcaacatcagcccaagattgtattgacagttttgcagcagctttttgtgcttcattaaatgctgaaaattcagaaatatgccacggcatattatccggcttactctccaggaaagaatactttaattggaaagctttagatttatcgtcatcctgatgcccccaacgataatcaccccggattaattctttagcagcatctttactgggctcatgctcaacgacaatattagagtctttacctggtatataagcctgtaaccatttcagcaactcatttgctttttctgaaccgctaacgtcttccgagtatgaaattttcttctttaaagacatatatttctccataaaatcaggacttagatataaaattctttttatttaattaaatacaagtcaataaaacctgaaaacaacagaccgcccctggtcatacaaattaacaactaaaatccctttcgcataaacgtaacactaaagttaattatgtaaaaagcaattaacatatttttttaatataaacgtgataaaaataacataaaacaaataagcgattgttttatataacataaccatttaagacgaaaaaaataccgctaatttcttagcggtattttattatgaattaattatctatttatttaactatatatgaagtaaactttaaaacacttataacattattcttgataattttaatcggagattatcccaagccgttatatgaatatacccgttatctttcaagttgcccctttgttggctacactcaccccggtcacatagttctctatgctcccggggattcgctcccttgccgtcgcgatccatcttgaaatccatagggtatatattattaaaaaattaataaccacttgattaaatcaataaaaaacatatatcacagaatagttaatatttcctttattataaagcactcagtcccaatataataaaattatatttttggtttttgaatataaaataatattatcaacatagctgattaattcaaaaacatattaaatataaaacagcgatttaaatttatattaaataaatattatttacatttaatagcaaaattaaatgctatacttaaaacattaattaaaataattaaaaaataatctctttcattatttttcattttataatattaattcatttaattatttaacattaatttcacgtttaattaaacgcttataataatatatttattttttatatttaccttaagtaaagttaaaaaatcaacaattttaccacataagtcatacaatattcattgttacattagatcataattacctcacacatggagtattatgtaatactttcttagctgaaaaaatgaattaaatcattctaatacacccattttactccgcacggtataagagataaaatgcaataatgtcattcaatactgaaaaaaacgcctcaggatatcactgaggcgttttaagaaatcttattttatgagttattccagaataatgatgaacaaccgtgaatcagtaatcattccggctagctgcataggcagaccaaatacgacgaacatgaaccgttatttcttccctgtcatgataaaggtgttttgcctgaatttgtgcattaatacccccttcttttaattgcaagtgcattttctgcaaattatgagcaacttcttcataacgctttttcatgggtaatttgagattaaaaatagcttcccggcaccagccattaactaaccaatctaccattaactgcgtcacttttgctggtttttccaccatgtcgcataccagccaataaatgttctttgccgaaggctcaaacttaaaaccatcaactttgtgatgtttaacttgccccgtatccatcaaacttttcgacatcgtgccattatctaccgcatgaaccatcatactccgtttcaccagttggtaagtccaaccaccagggcatgcacctaaatcaactgcatacaaaccgctagccaatcgctcttcccattcgtcatgtgggataaaaacatgaaaggcttcttccagttttaatgttgaacgacttggtgcatccgaaggaaatttcaaccgaggaatacccatataaaatggcgaattattgttactgtaagaataaccaacataacagcaacccggagcgataaagaaaacgtgtatcaccgggcggttaacgttttcccgaatcagcaagatcttttcctgacgcatagcattacgcaacggaacagtaaattttcgacagaattttaataactctttactttcattagtatcaggcacctcaacccgtaattcacctgcacgttcaatgacaccatgcaacatacctacaatcgggcttatccgatcttcaggaggtaaatctcgcaataattcacccacgaccagcatctggcgggcaaaaatcagctcccgaaatgggatctcacgaatcagccgatcggcatcttcatattgataacactcaaacaggacataaccactgttgtctttcacccgggcaaaaccgtaaatctctttttggcccgccttatcggtgatttctgctgcacactctttttcaaaaccagggcggcaatataaagcaattttattcatggcgaagcgccgatttccttagacgcaaagcgccaattaatactaaaaaccagccaataagaaagctaaatcctccaactggcgtaatataagcgaaaaatttaacctgcaataaggccatacaatagagactgccactaaacaacaaaatacctactgcaaaaaaaacgccactccagtaaaaccagagcacaactttacgcattagcatggcagacatcgccatcattgccagagtgtgaataccctgatattgcagaccaagatcaatccaacttatctgatatttttccatcatcggagataataaatgtgaccctacagcaccaaacgccacatagaaaaacccacttaagccagcaaagataagcattaggcgactattcactgttatcttcctttttcttctatctgagagcttttacagctcgaataccttattccgctcttactcattggtaataaagcccaatttttcctgctcactggctgcctgtgccaaaacccattgtctgaatgcagcaattttccccaattcagcctgattgtcatgacaaacaaggtaaaatgcattcttactcactaacacatcattaaatgggcaaactaagcgccccgcatcaatttcagtccgagccatgacattatttgccagtgcaataccttgcccatgaacagcggcttggatcaccattgcactatggctaaatatcggtccttgctgaacgtttatctgctgctgcatatcaagctggcgcacatacgcttgccagtcacgacgagaagaatcgtgtaacaacgtatgacgcgccaaatctgcgggggtcttcaaagaattttctccagtcagtaacgaaggagaacaaacgggaagcaaatattctgcgtaaagacgatcagtgcgtaaccccggccaatttccacgaccataaaatatggcaacatcaacatcatcagcaagcttatcttcttctctatctaccgcctgtatcctgacatcaatgccgggataagctaaattaaagctggacagccttggaaccaaccactggatagcaaagctaggtgaaaggctaaccgtcaaagcacctttagcacttctagcttgaagtttacgtgttgcttcatttatcgccgtgaatatctctttaatgtccagatagtagctttgaccttcttcagtcaacaatagtgatcgattgcggcgacgaaataacttcaacccaagaaaatcctccagacttttcatctgatggctaactgcggcctgcgtcacaaataattcttctgccgccttagtaaaacttaaatggcgcgctgcggcatcaaaaacccgcaacgcattaagtggaggtaaacgtttggacatgtgagcccttatgtaatgttggagataccggtaactctttatatttagttattagtttttgtaatccgaatcattataaattgtccattgaggatacaccagtaaatccctatagtggcgccacttcctaagccggaacgaaaagtgaatcagcttaacgctatgaaacttttggctttgtggttgtgatgttgtgtttgcaagttgtctgggaaaccggaccctgtagctcaagctactgttttttcacttcctgtacatttaccctgtctgtccatagtgattttttaatgcaccgcagttgcggtgcttttttttggcataaggcgtggaacatggcaatattattccatgtaataacctataccctatggatttcaagatgcatcgcagcggcaagggagcgaatccccgggagcatagataacgatgtgaccggggtgagtgagcgcagccaacaaagaggcaacttgaaagatgacagatacatccattttcagccagaaacaaatggttaagcaccatcaccactaaaacaaaattaatacttctatgaaaaagttcgaaccagaacagttccgccagcaatttccagcgctacagcaatttccatcacaacaatttccatcacagcaattaccatcacaacaacagacggtatttctggatagtgcagccactgctctcaaaccacaagccatgataaaggcaactcaagattattatcgaaacagtagcgctaccgtacatcgtagccaacaccacgcagcgctggaaatcacctcccgctatgaacaagcccggcaacaagttgctgaattcatcaacgctccacaagctgaaaatattatctggacaaaaggaacaacagaatccctcaatctagtggttcaaagttatttccgccctcatctccagcccgatgatgaaattatcgttagtgagcaggaacaccattccaatctgataccgtggttaatgttggcagagcaaatcggtgccaaggttattaaatggcctttaggcaatggcaaattgcctgatatccacatgttgcctgaactgctaaacaaacacacccgcttgatagccatcagccaaatgtccaatgtgactggcggagcagttgatcttgctgcaataactgcaatagcacaccaacatggctgtctggtcgttgtagacggcgcacaaggcgttgttcacaatcccattgatgtccaacaatcagatatcgatttctacgcattctctgctcataaactctatagttcgaacggcgttggtatactttacggcaaaagtgagcttcttaatgctatgcctccctggcaagggggcggaaaaatgctctcccacacgtcattcagcggttttatacccgaagcggtacctttccgatttgaagcgggcacaccgaatgttgcaggtattattggtttttctgccacgctggaatggttaaaagatattgatattaccaaagccgaaacccatgcagtcacactggctgattataccgaagaacaactctccgctttacccggatttatcagctatcgcattgccggttccagcttattggcttttaattttaccgacattcatcacagtgatttggccgccattctggcagaacaaaatattgcgttacgttccggtcagcattgcgctcaacccttgatcgaagcgttaggtatcagcggctgtttgcgcgcctcctttatgccttacaacaaccaacaagatgccgatgctttaattcaggcagtaaaatttggcctttctctattacaggatgaatgaattacaggacgaatgacattatgactcaagccactgaaaaccggattgcaccacacccatttggccgggaaatcagccaacaacagctcattgcaacctttgaccaatgccgccaatgggaagatcgttatcgccagttaatcttactggcaaagaaactgcccgcattaccagagaacttgaaacagcaagacactgaaatgtccggctgtgaaaaccgggtttggttagggcatcaattactgccagatggctatttacatttttatggtgacagcgaaggccgcattgtaaaaggcctgctggcagtgatcttaacggccgtagaaggcaagacaccggaacaagttttaacaaccaatctattggcgctgttccaacaacttgggctggaacaacagataagcggctcacggctaaacggcgtcaagtcgctgattaataccgtgcaaaacgccgcaagatcttatatgtaagattaaagatcaccctgacgttgcgctttagctatcatttttttcagagcatgggaaaccgcaacaaatccaaatgtcgccgtgaccatcgttgcggcaccaaaaccagaagcgcaatccatacgcttagttccctctgcggtacttttcgcggcgcaaacagaaccatcactctgcggataaactaattgctcggttgaaaacacacaatcaatgcctaatttacctttgccattcttcacaacacgataatcagatttcagcctttcgcgcagtttagccgctaaagggtcctgaaccgtttttgccaaatcaacaacctgaatctgtgtaggatcaagttgccctcctgctccaccggttgtcaccagcggaattttatggcgacggcaataagccaacagcgcagctttcggcctgacactatcgatagcatcaatcacataactgaatccagccgccatcatctcttcaacattatcgggtgtgagaaaatcatcaacacaagtcactttgcactctggattaattgccagaatacgctcggcaatcacttcagtttttggttgcccaatatgctgttttaaagcatgtaattggcgattagtattggtgatacaaacatcatccatatcaatcagagtgatcgcaccgattcctgtacgagccagagcctcagccgcccaagagccaacaccaccgatacccacaacacaaacatgagaatggcaaaacaaagaaagcgctttttgtccatataaacgggcagtcccggcaaagcgctgcatatatgcatcagaaagagaagtttgcattactgaatatcaatcctgaaaacctgttataaaatttatgaagagcaatcactgacttaccatcaacatggtaggctgcgctttttttaacacccaaacccgaccgtagtggttatagaaacctgccgctatacctgcctccccaccaataccatgatagatatcgaaatgatgtccctttatcgccccaccaacatccaatgcaaccaccagccgcatctggtactgaccggtaaacttaccctctctatccaacagaggtatctctgctaacagggttgttcctggtggaataagcattttatcagcagccacagaagcttttgcaattaaaggaacactactcgcaccacgtaccggtgcatagttttcaggtttaaagaaaacaaatgatgggttctgctccaacagttcacggacttctgcctcactgtgagattctgtccatttacgaatcgccagtatggagatatcttcctgcgcaatttctccgcgctcaatcagcaacttgccaatgctccggtaaatatggccattcttaccggcataacccaaaagagtcagtggcccaccatcaccaaaatcgacatagccactcccttgtacctccataatataattatcaatcagtgaacgactataaccaataatcagactggggctaagggcgccattgtctatttcagttcggcttggtaaacggtatttactcttaggcggcatccggtacagaggatatttaaattctccctgtttaacacgacgagcttgtaacactggcgtatagtagccggtaaattggacattaccgtaattatccacaccttccatctggtaagcgcgtaaattaaacagatgcaacttactggtttcaccacccgctagcatccagttttgaacagcgtcaaaagttaaactattacgattatacagacgaggagcagactgactaatcagcgcaacctgctctgaaaaatcctttgcattaactggcttaccctgcgcattaggttgattaaccaaccgtaaatcctgagcaatatgaccatctctatattgttggccctgtgctgttgggcgagaatgacatccaaccaacagtgaaatcacggttccacacaacagatacttaccccagtatttcattgttgttttctctcttaccaacataactctgtggcgaacaaaatactaaaccaatagaaacgatgaaacttaccataaaaaaaataacttaacaaaacaacgacacaaacgaatagaaaaacatcgatacgcagagtaactaatcaaaaacgtaacgaaacaaacaataattaataaaaaaacttgcaacagatcttatcctgagtatagtgcccgcatcggacgcgggatggagcagcctggtagctcgtcgggctcataacccgaaggtcgtcggttcaaatccggctcccgcaaccaacactataaagtagttcaatatttgcgaatggaaccgattccagcaggcgttagtgatgcaggaaaatacaaagtaggttctaaacggacgcgggatggagcagcttggtagctcgtcgggctcataacccgaaggtcgtcggttcaaatccggctcccgcaaccaattttcgctaatcaaaatatcaaaacggacgcggggtggagcagcttggtagctcgtcgggctcataacccgaaggtcgtcggttcaaatccggcccccgcaaccaattctctatgcatttcagcatacaaactccaaaagcaacttcataatgacttttagataattttttcgtcatcgtatctgctctcggtttaatgataaatatccacatatagtcatttctggctttgttatcgtttataaacgataacaaagccatgaatgagatacgacactatatcgacaacaacggacgtgatgtctttgaagaatggcgagaacatagtacgtgacaccaaggctcaaattgccattgaccgacgcattatgcgcatggaactgatcacaaacccttgtccgagggtgtctgggaactgcgcattgacatagggccagggtatcgggtctattacgccaaatctggcttaactgtagttcttctgctctgcggcggcgacaaacgtaagcaaaacccagagcgtgtgaatactggcgtgaatggaagagtagaaacagataggagaacactttcggtggagttcgtaacgtgaccaaggaagctgagttgaatccgaaccagctctatcgcaccttgtcagccgagggcaacccggaagttagaagtctaagcacgattctgcgtgtcatgggcttgcgcctggcagttcaacctatcactacccactaaatagggcagggagtataggctaaaggaaaatagcctccttccctgtttaacagcaaaaattacccatagcggcaagctcaaattgccaaattacccccattcttgaaataagctttgatacccgcaaaaattgactctgcgatttgctgctggaaacgtgcggttttcagtttccgctcctcttccaaattgctaataaacgcagtctctaccagaatcgaagggatatctggtgctttcagtaccgcaaatccagcttgatccacccgatttttatgtaatttattcactttgcccatacgcttaagcacttcgctaccaaatttaaggctgtcattgattgtcgcagtttgtaacaaatcaaacatcgtatgatccagatacttatcaccgcttttactcactccgccaatttggtcagcttcgttttgcgtctgggctagaaaacgtgcggtattactggttgcacctttagtcgagagtgcaaaaaccgaagagccacgggcaactcggttagtaacagcatcagcatgaatagaaacgaagagatcagcccgcatcttacgcgcttttgccacccggactttgagcgggataaacacatcttcattacgggtcatatagactttcatacccggttcacgctgaatgagcgttttcaatcgacgagcaatttgcaaaacaatatctttttcacgagttttatatttgccaatagcaccaggatcttcaccaccatgtccaggatcgagcatgataacaattggcctgtctttacctgctttgcccgactttggtttttctactggcagatcttctgctaaatgacctttattatactcttcaagtagggcaagcaatggatcatcatccgtattaaccctctctgccggataaatatccaacaccagacgatgtttaaatttcgccaccggtttcaaagtaaacatatgtgggctgaccgattgcttaacttcaaacaccaaacgaaccgttttaggattaaactgccctaccctcaccagtttaagataaggatcacgagattgaatctgctcccccatcccacttagagtatgattcagttgtataccttcaagatcaaccacaattctatttggattttttagcacaaactggcgatatttgagtggaatattggactcaagcgtcacacgggtataactagaggccggccaaatacgtactgcgataatttttgctgacgctgcgtaacccacctggctaacgctaagcaaccacatcgctgcggctccctgcaacaaacgacgtcgtgacagattatgatctgaatgactcatctactaatattccattcataaaatataaacattcagggtgatattcaccaaacgaaacgatcaagtgaaaaacgctaaccaatcagcattatgctgtcgtcaatgaaaagcattttatattttgcaaattattaacgtctacaggtatatcaaaatgtttttacctgaattgcctcttgccattttctctcaaaaggaataaaaaagcataaattacgaataaaaattcaatcgagagcctattatgaaagaacgaagcaccgagttagttgaaggatttcgtcattctgttccgtacatcaatgcacaccgtggtaaaacttttgttatcatgcttggtggagaggctattgctcacgaaaattttaccaatattatcaacgatataggattactgcatagtttaggcatccgcctggtcgtcgtttatggtgccagacctcaaattgagcaaaaccttgcagaccatcattacgaaccggtttaccacaaacacacccgtgttaccgataataaaacattagaattagtcaaacaatctgctggcttgctgcaactggatatcactgcacgcctttctatgaatttgaataataccccgttacaaggtgccaacattaatgttgtcagtggtaacttcattattgctcaacctcttggcgttgatgatggtgtggattattgccacagcggaaaaattcgccgtatcgatgagcatgccataaatcgtcaattagacaatggcgcaatcgtgctaattggccctgtcgcagtttctgtcaccggagagagttttaatctggcatttgaagatgttgctactcaattagctatcaaactacaggctgaaaaactgattggattctgttctactcaaggtgtacaagacaaagacggaaaaattctatcggaagtttttcttaatcaagcaccggaactgattaaagagctagaagttaaaggtgactactattcaggcacagtctgttttttgcggagtgcaataaaagcttgccgtcgtggcgttcgtcgcagccatttattaagttatcaggcagatggttctctacttcaagaattattctcccgagatggtattggcactcaaatagtgatggaaagtgcggaacaaatacgccgagctaatatcaatgatattggtggtattctcgaacttattcgcccactggaacaacagggtattctggttcgccgttcaagagaacaacttgagagagaaattgataaattcatcattatcgaacgcgataacctaactatcgcctgtgccgcgctctacccttatcctgaagagaaaattggcgaaatggcttgtttagcggtgaatcctaaataccgcagctctttaagaggtgaagtattactgaatcgcattgcggaacacgccaaacagctcggactggaaaaactgtttgttctgactacccgcagcattcattggttccaagagcgaggttttgagcccgcagaactctcaatgctaccgattcagaaacaagtgttatataactatcagcgccgttctaaaattcttatgctgaatttggaaccacagcctggattcacataataagcgcaacaccgttaatctgtttttaattccacactgactgacatacttggcgattaaataaatggttattttgtattttccattcatattaaattgtgaaacgcgccccaacagttagacattttgcctgtcgaaaggcagaagtccccatatggggcgcttacatttaaacggcgcaattcacctatttataaggcccgcgataaccatcgcgggccttgttaccgatcagtgccagttggctgccagcacaggttgcagccgctgttgctcgacatcgccgagcattgtggtcgcaggtgtcggcggcgcgaaggcagccatcgcctggacaagattttcgacatcactttccatcaaccgatgaccatcaccggccatgatgttacgtggtcgttcggtggaattggcataccaattatgcagcgttacctcctgcttgctgccaatgaccgaaatttgcagatcctgcccttcatgctggaaccacagacgctcagggctgatgtcctttccaaacaccaagttccccatatcaccactaaattccaaatcgttgtccccatgcccgacttctaccgtcgacatagtaccactggtcacaatatggttattaccctccccgacttttactttcgacataataccgctggtcatgatatggttatcaccattcccgacttctaccgtcgacatctcaccgcgggtcacgatatggttattgccatccccgacgtttactttcgtgaaggttcccgacgctttaatggtgttgttgccatgtccaactgttagtttgtcgatattgccaacaatgacgtttttaccattacctaacgtgatatcggcaaagcggtccatcacattaaccttattgtcaccgttaccggcaactattttgctatccatagctttcacattgatagtcttgctctcgtcccccaacgtaacctcggaaaagggatttttgaccgtaatggaatcagggtcagtggtcaccggtgtagattccactgctggctcaattttcggaacgttaagtgttgtgcgcggctcaacaggaggagtgctaatcggcttccggtcaatcagtgacatccggtcaacattctggtcaaaacgcgacctcaggtcgacaaggccagtgttaattctggtcggattcagctcaacaggggtaactttaatcatatcccggtcaatatcaatagaagaaattttagtcagactccagtcaataaggggaatgctaaccggcttccttgggggaatactaatcggcttcaagtcgataggggaaagtggtaaaggcttatcaacgccaagggggtcgacaattggtgtcaatgaacccggtacagtcaccgtcggtttatcaagagattgcgtcaccactggcttgaccgttgggaccaaatctggtgtaagctccgcaaaaaggaagtcggccgcatcgacctgcgaagtatccagagtatcgagatacagcaacttcacgtttgaatcagtaccgctgaccccattaaagaccacctcaacgccatgaatttgtgacagaccgttgatcgtgccacgatgactcttagcaattgtgagttggctgaaatcagtgacgccggcttgacgcaaatcaattttatcaatgccgtgacggaacccacgtaatgcattcttgtagtccctggcacccggttgggcggccaccacaaaaacgtctgacgccgcactgtcatgactatagatcgtcccattcaagctaaatttcatctgcccctgagcatcgctggtgagcatgacgcccttgccgccgcccttaaggatcacggttcccaagccttcttgtggctggagcgttgcggcgtcgctattcgtgtaagccaccggggcgataaaagtatcctggaacttgaagttcgccgcaccgatcccggcgagtggctgatttttcaggacaatgctctgccccttacccagatcgaccttaacatccgccccctgctgcgtcagcaacagatcggcaaacgtttttccacgaaatccgaccagatcgatgatttcgccacgagccgcctcgaagttgctgataacatcgctgcctgcctcacggtggtggaccacaaagaagtccttgcccgcaccacctgccagtgtgttgtttccacgcccgccatcaagcaatgcatcggcattacccgcgaccagcgtatcgttgccatcaccggtgacgatgttctgaatgcccgacggattctttattgtcaacgctgtgccgccaatgctggcaacaccggtcagcaagttgaccgaggtatcccgcgaaacagccgccgcattgagggtattacgccctcccgccacgccattgaccgcatcatccaacactgcgcggttggcctgcccgaccaccgattggatatattcgtcggtgtaaaagtaagtgtcatccgaggtgctcttgctgccgtacaaacgtagcgaccaggcatttaatgtgaccggcaggccggaatgcgcatcgctcacctgtagggtccagttgccagccgagcgttcacccaaatcatgagtcgacataaagctgtatttgaacgtccccgactggctactacccagatcggtcgcactcgcgcccggcatgccgtctggaaccttaccctgacgattgagcaagatgctctgagtgccatcgggagagatcagtttgagcgtcagatcaccaagacggcctgcctgggcgtcaaaatcgatctcgacatgctcgacattcagaccggcattcatggcgatggacgacgtcagcgtttcacctgctgccaaggttttccccagagggccgctggatgcgctatagacgaactcgttggcagcggtgctttgagtcatccaagactcagccaggcgaacagcggctcgcgcatcgatttgaccaaaaccgtaatcgttgctggcatgcatgccaccgccattccagctatggctactattatcgctccatgcggtagaggggtcattgatcttgcgagcggacagagcaaggatctgctgcacatcccgatagcctaagttcgggttggcctcaagcatcaacgcaacaacaccggagactatcggagcggcaaagctggtgccttgcatgctggtgtagtcattgccgaaagttgagccacgttcggttttcagcatatagctggtagacacgacattgctgcccggtgccgaaaccaacaggctggctcccggattggagaagggtgaggagccaatctgcaacgtcgacaaatcgccctgtgcgttgattgcaccgacttccaccgaaaagcggttgttattggtcagcgacccctgagcattgccgccttctgcacgatggttgccgcccgccgccacgatgacggtacccaatccgccacgaccattagccgccgcatactgcgcattcaggctcagcgacgcggcagtattgatggagccgccctgaaagctgctgagcgcgaaatcgttggcaaatccccagctattgttggcaatatcaaaactgaccatatgccccagtcccgcaagatcggcaccgtcattggccagataatagccgcccaacgtcgcatcatgggcaaccccgacgccacccgtattattcttcgccgcgaccatcacacccgccaccattgtcgcgtggttggagaccacgttcggcaaggtgccattggtttgttgagtctgcaaccaagctttgtcgacattcgccgcaaggtcggggtgattgatatcaaatatttcaggcgcggtggcaaacttaccgcccggctcgaactgaccaatgcgtacgcccttgccggtgtagtccttccagaccggcagaatgttggcatcgctcaaataccattgttgagcagctaatggatcgagcgggacttccggggtcaataatgtcgcaacggcgcgcatcggcgcggtttccccactgctgagatcgactaccgatgctgacggattcccggctgcgtcagttaccccatatttaaagctaatgacaccggtgtaatctgcatccggcgtaaacaagacatcgccctgagctgtgaggctgaccgtaccgcctatcgcatccccaacattggcaatgcgcagggtaccctgactgttaaggtgttgatcgttagccagcagactttctgcggcaatcagatgaggctgagtacgatcaaaaaccttgccgtccttgtcgtgagtgaggacatcctcgacaggcatcgcattgggtgtttgtaaatcaaccgccgaaatatctgaaaaattgagtttttggatatttttcagcgtaaccgtgccgtcacgcccggcgaccttatcggccaccacatacccactgtcggtacgggtaatttgataatcgccgtggttaccgtgcaggctgacgatgttgacccctccgtccccatcaatcgtagcattgccgtgacccacttcgatcacatcgtcacccacaccaccgaaaatcttatcatcgccgccgccagcgtgaatgatgctgccgtctttggaggcgtaaattgtgtcgccctgaggaccggcatagataaccgacttacccgtgccaccaacgatggtgttgtgcccactgccgccgaccaggacgtcgttacccatgccacctatcagagtcgaattgccggaaccgcccttgataaagacaccgttgacactaccgcttatgatagtatcgttgccgcttccgccttcggcgatggttaaactggcttgacccatgttcagctccacgccttggttaccgacaatgatcgccgtatcgtgcccgccattgccgtgaatgtttttcgtatcgtcagaagcgctgatgacaaacacgtcatcgccggcaccaccgacataggtattgctccctgcgcctccaaccagccagctgccggtttttgccgcaatcaacgtatcattgccgctgccaccatacagattgctgactcccagttgctccgcatttaaggtttcatctgtttcactctggctggcgtaagccgtggttatgatatcgttgtgagtggaggtcactcgtgtgccagctccctgagtactcaaggtattactgacggggtcaccaagaaagtcgacggccagcacttcctgagttttaccattgatagtaaacgacccactggcaacgaccttattcccatcacggacgtctgttttgttcgaagcccggacgtttatctgagtaataccccattccgccagtgttttgagttcgcccgcatcgacttttgcatcgtgggtgccatcaacccagacccgtaatttactccagatcggatcacgttcatcaatcacgccgtctttgttggcatcttcactggctaaggcaccgaaaccctccttgaattttttttcgcccgcggcaccgtttattccggccttaccaccgtagtattcggagaacatctggccggcattttttatctgaccgctaccatcgtcgatcaccaatatcccggtattgcgatccgcccagccgctgcgcttaagcgtgccactgttatccatgtcgaacaacacgccgtcacgaatgtcagtcatgtgcacaccattgccgctcagatccaataacagcgggtcaacataagtgttaaacgttgtcatcgccgataaaccgttcaacgtcacagcgttgcgcaggccgaagtccagcttgctagtgtctccgggttggtagaaaggcttgtagaactccgacagatagctgttgggcttgacattggggtcgagctgcatttcaccgggacgaatgccaccggtggcaagacctgccatctgggtggaggcaaagtctgttttattgagcatatccccgacggcagatattttatgtgttgcagaattttgtataaacccgttagcaacatcctgctgagctttgttttcgccctgaatatgccgcagaggttttggcgtggacacgatatcgatgttaatcaatggcttcatcggtagagtgattttcgtatcctctggcctaagccataaacacgctcgaccactttcatcgtccagataataaaagtcactataacgaatataacgactcaagttgtcacggataattcgacttccattattttgcaacatatcacgcaaatgcataggattatgattagggaacagttctccctcgaaacctttttcgttatagccaacggcttttaatgatgcaaatacgaaatccacgcaactgtttttagccacgttgtaatgcttagcatcaaatccaactaacgatgggccttctgaaaaagcttttaacctgttgtactgaaattcagtcaattctacggtggtttcgtaagaggtctgttgataggcggcattatcattattcgttactcgcccctctccccacggttcatcataccttgactcaaaaccgtaacttatttcacttccgctcccgtcattcaaaacataccacatatgaccgccggctgaagagtgtacgtctcccgctttatgttcgttcttatcttcctgataaacatacttagcccccatcggagcaactttataggttacagtatatttcttttccatacttattatttcctctactgattatttctctttgtttttttctgaataagtcaaatttttggattaaaataggagaattcgacaaaactctcgatgtcattaaaaacagggacatcctccaggatggtaattaccgcagagtaacgtccagggggtaactcaagtattttaatgtttcgcacagccatatttattcttcttccttcgtaatcaagagactgtccccaaccacgtcctcctgcatttattttcttgtcaaaaaaaatcttgctatctttaactaaatgaagcgaaacggggattattaccccgtccttatcaacattcccgaacaattcaagtcgctttttcatttcctcatagtcatcccctttatcaaacagcaaggcaaactgataatttcctttcttgctgatttcaaaatcaattttgactgactgaccagacttcgatacgtcaatcggtttgtatatatcaatgggcttagagcaggccattaataaggcacagctcataaaaataataatgttgcgccagtttttgaatctttcgtgtacctgtaatactttcatttcttcactccaaattttgatatttcctttgtttatactgataccatttcaaatctttggatcgtaataggtgaattcaacaaaactctcaatatcattaaaaacagggacatcctccagggtggtaattaccgcagagtagcgtccgggaggtaataaaaatgttttaatttctctcacagccgtatttatacttctctcttcgtaattgaagacacgccctccttcggaccctgaagcgtttattttcttatcaaaaaaaatcttgccatctttaacgatatagagtgaaacagggattattactccatctttatcagctctcccaaacaacttaaaccgcctttccatttcatcataaccctccccagtttcaaacagtaaggcaaactgataattaccttccttgctgagttcaaaatcaattttgactgattgaccagacttcgatacgtcaattggtctgtatatatcaatgaacttagagcatgccattaataaggtgcaactcataaaaacaataatatttcgccaatttttaaaccttttatatatacgtaataatttcatttcttcactccaaatttttatatttcctttgtttatactgatatcatttcaaatcttcggattaaaatatatgagttgtacaaaactctgaatgtcattaaaggctgggacatcctccagagtggtaatgaccgcagagtaatgcccggagggtaacgaaagtgttttaatttctcgcacagtcgtatttacccttctctcttcgtaatagaaggtacgcccccaaccacttcccacagcgtttattttctcgtcaaaaaaaaccttaccgtctttaaccacacgaagtgaaacggggatggcaaccccgtccttatcaatacttccgaacaacttatccctcctttgcatttcaccaaaaccacgcccagtagcaaacagcagggcaaactgataatctcccttcttgctgatttcaaaatcaatcttgactgactgatcagaatgcgacacctcaatcggtctgtatatattaatgggctcagaacatgctattaataaagtgcaactcataaaaataataatgttttgccaatttttaaacctttcgtatacctgtaatactttcatttcgtcactccaaattttgatatttcctttgtttatactgataccattttaaatcttcttaaattttcggattgtaataggcgaactcgacaaaactctcgatgtcattaaaggcaggaacatcctccagagtggtaatgaccgcagagtaacgtccggggagcaattcaagtgttttaatatcgcgcacagtcgtatttattaatctcttttcgtaatagaaggcttgccacccatcgagccttaccgcatttaccttcttgtcaaaaaaaacctttccgtctttaaccagacgaagagaaacgggaatagcaatcccatccttatcaacactcccaaatatcttagatcgcctgtctatttcattataatcacccccagtagcaaacagcagagcaaattgataatttccagccttgcgcttgctgagttcaaaattaatctcaaccgattgtcccgaatgcgacacatcaatcggcttgcgtatagcatcaatgtaattagagcatgctactaaccagatacaactcataaaaataataatatttcgccaatttttaaacctttcatatatacgtaacaatttcatttcttcactccaaatttttatatttcctttgtttatactgataccattttaaatcttcttaaattttcggattgtaataggcgaactcgacaaaactctcaatgccattaaaagcagggacatcctccagagtggtaatgaccgcagagtaacgtccgggggataacgaaaatgtcttaatttctcgcacagccgtatttacccttctctcttcgtaatagaaagactgccccccgtcgtatccccctgagtttattttttcatcaaaaaaaaccttatcatttctaaccagataaagtgaaacagggattgttactccgtcatcataaatactcccgaacaacttaaatcgcctttccatttcatcatgatcatcccctgtagcaaacagcaggacaaactgataatttccagtcttgctgatttcaaaatcaattttgactgattgaccagacttcgatacgtcaatcggtttgtatatatcaatgggcttagagcaggccattaataatgtacagctcataaaaataataatatttcgccaatttttaaacctttcatatatacgtaatattttcatttcatcactccaaattttgatatttcctttgtttatactgataccattttaaatcttcttaaatcttcggatcgtaatgattgaattcaacaaaactctcaatactattaaaaacagggacatcctccagggtggtaattaccgcagagtagcgtccgggaggtaatgaaaatgttttaatttctcgcacagccgtatttatccttctctcttcgtaattgacggcacgccctccttcggatcccgcagcgtttattttcttgtcaaaaaaaatcttgccatctttaacgatatggagtgaaacgggggttattactccgtttttataaactctcccaaacaactcaaacctccttgccatttcatcgtaatcatccgtagtagcaaacagcaggacaaactgataattgccttccttgctgatttcaaaatcaattttgactgattgaccagacttcgatacgtcaattggtctgtatatatcaatgaacttagagcaggccattaataaggcgcagctcataaaaataataatgttgcgccagtttttgaatctctcgtttacctgtaatattttcatcacgtcactccaaatttttatatcttctttgtttatactgataccatttcaaatcttcggatcgtaatggttgaattcaacaaaactctcaataccattaaaagcagggacatcctccagggtggtaattaccgcagagtagcgtccgggaggtaatgaaaatgttttaatttctctcacagccgtatttatacttctctcttcgtaattgaagacacgccctccttcggaccctgaagcgtttattttcttatcaaaaaaaatcttgccatctttaacgatatagagtgaaacagggattattactccatctttatcagctctcccaaacaacttaaaccgccttgccatttcatcatgaccctccccagtttcaaacagcaggacaaactgataattgccttccttgctaatttcaaaatcaattttgactgattgaccagacttcgatacgtcaatcggtttgtatatatcaatgaacttagagcaggccattaataatgtacagctcatgaaaataatcatattgcgccagtttttaaacctttcatgtatacgtaatactttcatttcatcactccaaataaagtaaggcggcgaaaaacattaacggtcatttatctcaaacccggaaaacggtgagtatggcgagccgagttcacagagctgccctcacaacctaccgttctctcagactttcatctatatgttgctgcaatgggctcaagaagtaatcgatcacgcgacgttgatcagtttttatttctgccgtgatcgacatgcccggagacagtgggactcgctgaccattgaccatcacgtgatcagacttcaaacgaatgcggctgctatagatgagcccatgcttttcgtcctcgatggcgtcgttcgacacgttgagcacttcgccgtcaacggtgccgtacttggtaaaagtaaaagtttccactttgacggtgaccggttgaccaacatggacaaaacccacatccttgttttccagcctagcctccacttctaccgattggtctgcggggacgatgaccatcagcggctgagcaggtgtcaccacaccaccgacagtatggatagcgagttgttgaactgtgccggccaccggggctttgaggctggtcaaagtttcctgataacgggccttcgccagctcctgaaccagggtcgctacctttttgttggcttcctgttgcaggtcgagcatggcgcggcgattttgcgcaacaacagcctcacgccgacgtcgcgcctcgtcctgagcggcggcgtgctgcaagacactggcctgctgtacgcttaactgacgttgcagatccagtcgcgtctgctctttttccagatattcatgccgcgacacatactgtttcttcaataaccgttggtaatcctcggccaatcgtgtcgcaatcggcagcgtttttcgcagactagccacctgggcctgggctgactggatttcggcgctgcgttggaggatttctgcatccaccaactccaggttgctgcggtattcctgatattgtccttgaagccagcgttgggcactgagtacctgctcagggttggcgttgtcaatcgttcctaccagcgacgccggcgacttttgttgattgatcgcgtcgagcatggcggcactccgcgcactgtcgatacgagcagccagcagctcgctctggatccggctgacatcggcgctcgccgccgtcgggtcgagctcaaccaacaactcgccaactttcaccgactggccgtcattgacgtggatcgctctgaccaccgccgtttcactggattgaatcaacttggtcttgccattgggaacgacctttcccggggcgatagccactacctcgattttgccgatgtaggcccagagcaacgccaatacagcaaaacccagaatggtccaggtgaaaattctcggtgctgggtgaaccggtgtttcctgcaactccaaagccgtcggtaaaaactgtaattcatgagccagtcgcggcgacacgtccatgtttttacgttggtgccaagactcacgccacgcgtgacgataacgctgcaataaggaaagggtagcgctcatttgaaattattttccttgaatcggagtatgtttatcttggtcacatctgcctctgatggtgttattaaccattgattatgttattaaccattgattgcgtgattagccgttttgatcgtactttccagaaatggaggcctgtcatccctgctgcattcgatgcagtcgtgaatagtggccgtcctgacgtgccagtaactcggcgtgggcgccctgttcaacgatctgcccgcgatccattacaaggatacggtgcgcgtcgcgtacagcggacaaccgatgagcgataatgatgaccgtgcgccccttgcaaatgctttgcatgttctgctgaaccacccgctcagactcgtagtccagcgcactggtcgcttcgtcgaaaatcaaaatgcgaggattgccgatcaaggcgcgggcaatggctacccgttgccgttgaccgcctgaaagtgacgcgccgtgttctcccacaatggtgtcgtaaccttcgggcagttcaaggatgaattcatgagctccagccatgcgggcggcgtgcatgaccacttcgagcggcgcacccggatcgctcaaggcaatgttttcgcgaatgctgcggttgaatagcatattgtcctgcaacaccacgccgatctgccggcgcagcgaggacacatcagccaatgccaagtccatgccatcgaccatgacccgtccgcgctccggaacatagagccgctgcaacaagcgggtcagagtgcttttgccggaaccggagcggcccaccacaccaatgatttctcccgcgccaatgaccagattgacgccgcgcagcacctcagaaccatcagcccgataacgaaaatgcacctgttcgaactctacctgccccttgagcggcggtactgtgctacgtgtagcctgagacaattccgtacgggaattgaggatatctcccaggcgctgcactgagactccggtctgctggaagctggtccacagttgcgccaaacgcatgatagggccgctgacacggccggccagcatattgaatgcgatcagttcccccaccgatagctgcccgtctatcacgaggcgggcacctagccagagtgtggcaaccgtcactaacttgccgataagcgaaacactttcattggcgatagtggataaggtctgtgttttgaaaccggcggcaacataagccgccagttggttgtcccacttgcggatggcctgcggttcaaccgccattgactttagggtatcaatgccattgaccgtttcgacaaggaatgcctgattctcagcgttgcgggtgaagctatcctgtaatcgcttacgcaagagaggtgtaaccaaccccgagacgagtgcataaagcggcaatgataacaccacaatgagagtcaaccagccgctgtaatagaacatcacaaggatgaacaccagagaaaaaagcacgtcgagcatcagggtaatggcgttgccggtaaggaagctacggatattttccagttcacgtacacgagccacagaatcaccgactctccgggcctggaagtaagccagcggcagattaatcaagtgccgaaacagattcgatcccaactgcacatcaatacggctggtcgtgtgggcaaacacgtagctacgcagaccgctcagggccgactcgaacagcatgatgcccagcaatcccgccgcgaccacatccagtgtggttaggccgtggtgcaccagtactttgtccatgaccacctgaaagaacaacggagtcaccagggcaaacaactgcaaggcaaaagaccccagcaaaacttcacccaacaacttgcggtatttgacgatagccgggataaaccaagtgaagtcaaaacgagaagtctctccgggcagaccgttactggaacgcacaagcaccaattgccctgtccaacgctgctcaagctgctcgaagctgataacttcggggcgcgccgaacgtgggtcctgaatcagagcctgttctttatccagtttagccaaaataaaaaattgcccatctcggtcaatggcaatggcgggcaagggagtatgttcaagtctggccagtgttgtgtgtacagccctggctttcagccctgaatgacgagcagccagcagcagctctttcagggtaaaaccttggctggcagtggaaaattcgtgtgaaagttgttcagtcgatatagcgatgttgtgaaacctggccaacattgccaggcaaatcaggccggtgtccagccccggggaagagtggggtgactcagtactcatttcattatcttgcatcagacaacttaatccttaaatcaaaaatctggatattcatctcacccctagcaagctatccagacatatccgcaatccgtttagtaaacaaatcacaattcatataattaggcgtttatatcatcaaataataataaatttcatttaatatattcacaaactgtgacattaaccacacaataatattaaaatttattaaatttataattttattgtttacattgataacaaaacataaacatcagcaatttgattcagtcattgcaactatttttgaatcttttgaatcggtgaaattaagatatcgatcagtatatagcctatggatttcaagatgcatcgcggcggcaagggagcgaatccccgggagcatagataactatgtgaccggggtgagtgagtgcggccaacaaagaaacaacttgaaagatgacgggtatatagccatcacgatgaaactactcggtattgctgactgaacgattacgactcacaatcaatcaacatgaaggactaagaaaagatatttcagttagaaattaaccaaaatttggcatataggtaggtttaagatacctttatcttgcataggtcaatgtaatctctaattcactgcacgagaatttttcaatcacccaatcgagaactttttacaaaactgaaaagggatatttaccgaagtcagcacggcaaatcagaaatctcattaaagggattaatgatctgattgtcgggcttaaaatcccatccaacaacagaacaaataacgatcaaaaaaatgtcagagaagatatggcaacatcgttaatatataaatttttttgcacaagttagtctatcagaataagtactaatccacctgtaagctaagccgctctgctaacccgcttcgcctttgagttggtgtctggattgcctgacgcaataccgcttcatgtgcataaagagtcagtttttctctggcacgggttatcgctgtataaaccagttcacggctgacaaccggcacaaattgcgttggcaataccaaagcggtatgttcaaattctgagccctgcgatttatgtacggtcatcacatacgcagtttcatgttgtggtaaacgacttggctggactcccttaatctgcccgtcaggcagttgaaaataagcacgcagttcatgattttcgtctctgagcataataccaatatcaccattaaataggcccaatgtgctgtcgttacgcgatatcatgatgggccgccctgcataaccacggctgaaagtcccgactggacgacgaataagcccctgacgatgtaatagctgttctatacgctcattaagcccactgacaccaaacagcccttctctaagtgcacacaacaaacgatagcggttaaattcatctaaaatctctttgactggtgcctgttttgccaccagatgcaagtaaaggtaataacccgataccgtttctgccaacaaccgctgataatcttcatcgtcagacaatgggtaaaaacagatatccttcaacggttgctgcaaaatagcgagagcttgtcgactctttccctgattaacggccgtcgccaattgaccaatccccgaatccacattaaaacgataacttttacgtaaaagacacaaacgatcacgaacctctgggatattttgctgatcacccgcaactaaccggcatcccgtcaatctgcttagctgttgcgccctcgttacgctatatccgagttcggcaaaacggcaaatatcacccaacaccgcgcctgcttccactgatgccaattgatctcggtcaccaagcagaacaattttcgctttcggtggcaatgcatcaatcaacctagccatcatgggtaaatccaccattgaagcttcatccaccaccagcacatcaaggttcaatggattatctcgatcatagcgcaagcgctggctatcaggctgcgctcctagcaagcgatgaatcgtctgcgcctgatccggcatacatgcaaattgttcctccgtcagaggcaattttctgaccgcactattaagagattcggtcaatctggcggccgcctttccggtcggagccgccagttggataacccgctttttatcaggttcaagtttaattaaggtagccaacagcttagcaacggtggtagttttcccggttcctggtccgccagagataaccgaaattctgctagtcaccgcgacagccgcagccattttttgccagtccaccatttcctcagatagcatgaataattcatctaaaacaactttcagttgctgttcctgaatattatcgattggttgattgccggaaaaaaaagccgccacctgacattcactttgccacattctctgcaaataaagccgatcatgggaaagcacaacaggcgtgggttgaaatccatcactaaccgcagcacaattttccagtgctatccgcaaactctgctcatcaggttttcccgcaacctgccataactgttcggcaaattcacgatgtcgcccatcaaaaaaatattcaggcgttatccgattaaccggcaggcaaacatggccggtaccggtttcagcgcttaacagcgccatcaccaacaacaaaacaggatctttatcctcaatcaatacatgagcaaactgtaagtccaatgaacgcaaaagcctgaggtttactgcttgttgtaataacgaaatcatcaatttttctctttctcaagctgttcactaccactgaaaagcagatccaaagcatcaacaaattcagccgatggccgacaattgaaaataccattccccggctgttgtttatctattcccctcagaaacagataaatcacgccgccgaaatgttgttggtaatcataattagccagcctgtgacgcaagtaacgatgcaatgccagtgtataaagttgatattgcagatcataacgatgctcaatcatggctatttccattgcctggcgagtataaaactgactctcctctcccaaccagtttgatttgtaatccagcaggtagaatttaccttgccaacagaagaccaaatcaataaaccctttcaacactcctttcacctgctgaaattccagttgggggcagcgagcagaaattggatcataacgacgtatcagtgtatccaacatctgagatcgcaaaagttgttcaaccggcagataaaattgcatttcatcctgttgatgatgtagcggaatttttgccaattgcactccttcatcattcaatggaatagtaaaaatatcgaccatccattgctgtaatgtcccactccagcgttcatcaaatccggctgattgcagttgttctgccaaccatttctcatcaggtaattggctgaaactaagttcttccaaaatagcgtgtaaaaaagtccccgcggaagctccccgtgggaatgtatgtggtgtcatttcaggttgttctactaactgtctttcaccactagcatcaacatcaagttttggcgcaatagactgaacaatcacgtcaatagattcttctccagcaaaataagcggaagcattaccacgatgaactacagagtttcgtaaaccagaataactggtaatacgccaatcatcctgaactctacgtttaaattgcctggccgacaggactaaatcatttttactttgcgattgccaagggtgatcatcagtctcattaattgatgatataacaatgccatctccgcttaattctttaagcgatgttgccagaaaatcagcatcccctttcacccccttttgcaacaggtagcccagagcacattgatgcagatcagtatccccggcctttttcttattgccttttatcagcggagccacgccgacactgcaatggtaaacagaacgcgtcaatgcgacatagagtaaacgcaaatcctctgccaatcgctcttgttccgccagttcaatcgtctcgtcgtcaggaaagatatcgaggcaagcattaaagcttgtacgatcatgatatatcgcccgcttctgctccctgaaattacagataaatggcaaccataccagcggatattccagccccttagatttatggatagtacaaatttgtaccaagtgacgatcgctttctagccgtatctgctgattttcagattgtggatcaggatgagagatttgctgagccaaccagcgagtgaccgcatgttcactgtcaagttgtaaagatatctcctgcaacaactcaccaatatgcatcacatctgtcaagcgccgttcaccgtcataactggcaagcaaattctcagcaatatgatggttggcgattaccgctcgtagcataggtaacacgccacggcgttgccacagacgaaagtagccatcaaactcatcaactaactggtcccacgtcttctcatcatgatttagtttgtctatctgtcgagcggtcaaaccaaacaaaccactggcaagcgcacttctcaacacccgctctttctctggtgataacaccgcttgcagcaaccagagaatatccttggcttctacggtatcaaatacactttctcggttagaaagaaatacggaagggatagataacagattaagtgcattacggatcagtgtcgcttcctttctactacgcaccaaaaccgtaatatcagccgccgtcacaggccgagaaccttcacttttatgtaacaaagcccgcccttcactacctgcctgcaaccaatcacgaatttgcgcagaacagagccgtgacatcgtttgctcataatctccgatagaaacaccttctcctggttgtaaccagaaattcagtgcggcctgttcttcaccgtcatagctaaaagagagctctcggtttttctctgccgcagaaacttcaataaaaggaatctgctcaaacaaaaatggattttctgaacgcataaacagtttgtttactgcctgtaccatcgagtaggcagagcgccagtttgtttccagagtatagtgagcacttacctgagagcgggcacgaatataagtgaaaatatctgcgccgcgaaatgcataaatagcttgtttgggatcaccaataaatagcaatccattttcaggctgagtgccataaatggtatgaaaaattcggtattgctgtgggtcggtatcctgaaattcgtcgatcaacgcaaccggatagcgtcggcggattgtctcagcaagcaaatcactgccgggacctttcagagcatcatcaagacgggttagtaaatcatcaaaccccatttgaccacgtgttaatttttcctgacggattgattggcgaacctcaataatagctctggagataatcaaatcacgtaaagtaagtggtttctgatataaatcatctatcacaacaaaaagtgaatgttcaggtacctcacctttttttgtcttttctgccaatactgactgccggaatttctccagcgcttttggcaactgataatcctctgtaggcgtctgagcccaatccatgacactattcagccaatttggtaagtgcttactactgtaacttcttttatcgacaccagaacccgcaattaaatcgtgcaactctcccgcagcttcattccattggtatttaacatcgttgatcaactgggtaattttttcatgacgacttaacagcgtttcatcgctggctggcgcatcaaccatatatggcatatccccttgtaaataagggtataattcagccaacagggcttccggcccactccactcctggctgatcacctgcgccattgataacggcaatggataacagtgtcgccgccagaaatcggcacacccttgccgttctaacggatgttgatcctgaattaatgtctgttcaaacaaaatcccagattcaaaggcattatgtgccaacattctctgacaaaaaccatgaatggtataaatcgccgcttcatccatttgccgctctgcggcgagtaaccaaatagccgcctgccctttatccgggatttcattcaatagctgttgataggcaggttctgtctcttctattgcatttcgaatacaggcaaggcgaagtttatgaatattttcacggatacgaccacgtaactcatttgttgctgcctcagtaaaagtcaccaccagaatttcttccacgcttaaaggccgtgaaaaagcggcatctttccccagtccaagtagaagacgcagatataaaatgccaatggtgtaggttttacccgtcccggccgatgcttcgatcagccgctgaccagtcagcggcagagttaatacattaagcctgtggacagatatctctgtgatcactgagctcttacctcaacaggtaaccgtttctgaaattcagtcacattttgataggttttccaacctttcaatttcgcatatccatccaagtttcctgatttaccaatcacttgcgaaatgaatgacaaccctatatgtttgatgaccgcattccgatagaaactaatcaattgttgctgtgtagttttctttaggatctcaagcattttatctctactgtcaaaactaaagttattacgactgaaatcaccggagaaacgggcaacttcggcatagaaagtttgtggcggttgctgcttttcattaatcagcgcactcttgtactgctcaaaatcagcttgaggcatggctttcaatttattacccacgttctgatagaaatcttgataacgctgattcaaatattttggttgcttgctattactttgcagtaggaaacccaacccccactgttcccccacactggtattgaaagcaaacactgcataccccagttgctctactgttcttaactgctcatagaaccacggctggagcatgttgctcaacaaactggaataaacataaccttctatacggttataacccgtcggaatataaacctctgctaaagcaccatctgtgctgctgccaacacgctggaaattaaccgggtaatttttatcaatcaccaccttatccccactccaccaatcatttccttgatttgccagttggttatgggcagattcagcaatcactttgctctgctgttcggtcaaattcccaatgatcatcatttgcaaagcagcattttttatcatctcatgacgatacgtaacaatatcctgaaccgtgatagtctccagcgcttccagacgggtggattgttcaatgtaaggcaccacagaaaggcgcttcaacggctgcatagccatgtcataagctttagcgttattagaaaccgctatctgctcacgataccaggacttagcctgtgccaattgctcctcagttggtgtgaatgccatgtaattactgattaaagaggttaaaagcgctggcagactctgagtgtaaccacttactcctaattgcagcccctgagatgagcccgtagaaatattcattcctgcaacagaagcctgataactaagctggtcaagggaaagccctgccaaataatcaagcaaagaggaagtgacctgctcacgagcgctattcaaaccttctgcgttgcgcaaatcaagcgtaatgctggctttaggttcatcagcaaaatattggctcggcatataaagcaagcggacattctgctgttcaacgatcatttctggatgttttttactcttatctgcttttatcagcttcaaatcgtcaggaatataaggatttggtgcgggcagagaaaagctcatctgctcctctaattgctgccatttaactcgttgctgcaatgtaattcgatcaacctgataaggtgcctgaacaaaataagcctgtttattgtgtggctcttttggactgatataccagattcttgcattttcaggtgttaactcagcaagccgattggcgattgctttcgggtcatagttatcagctaaataaccggcattcagtacattggaaacaggaactcgcaacatagcatccgataaccattcgatataatgcatatcacgaacaacggaaccatatcggaaagataggttcaaaaccttcgcgatttcatcaaaataacttttctgaatgcctttttgtttcaataaattaatataagcaaaaatagccgcaacaatctgatcccgttgtgcaagccctttatctgtcaacgtcacataaataaaaaagatacctttgttgcgatcaaccataggctccgcaccggcactgatactttctgctagtccttgagtttgtagccaatctgataatgtattcaggctacgattgcctattatataaccgagatattcatcggttttactgcggaaatcagcactgttattgtcaatactgaattccaattgcaatgccttttgcggttgggcaggaacataatggatgataatccctttctctttttccgttactgctggcacagtaatcaccggcacactcgcttttctatccggtatccgaccaaaagtatcaacggcaatttgagtcagtttatcgataggctgattaccgtaaatgacacctttcatcaggttggctgaataatagcgttgataaaaatccaccagttctgtctgtaatttactccccggtttatcttttaatgtttctagattaccaccagaaaaacgggcattgggatgcttaggattcaaggtttctgcccgtatttgagcaacccgcatcccatcacgcgaacgcgccattgtcagctctgcattaaccgcatttcgctcccgatctgcattcactggattaagtaacggctcagccagtgcatcagccagacgatctgtggcttgagctaacgcttcattttctacttcaaggtagaaagctgtgcggtaagaagcggtgctggcattatagctaccaccatgtttttgcaaaaattcagataaatcacctgactgtgggtaacgttcagatcccatcagaaccatatgttccagataatgtgcaagcccgagctggctgtcagggttttccatactaccaaccggaattgctaccgctgccagagatttggttgccttctcatcagataccagcaagaccgtcatattgtttgccagtttgattccctgatactgacgatgatcactctcgcttttataaattgtctcttgcagtagttgtgatgattgtggtgtttgcgcataactcgtcgttccccaaaaaagcaggaacatcacagtaatcatgcgaacaaaatgtttatgcattatctgatattctctctatgtattctgatatcgcgctatcggtaacaaataactgagcgcttcctgtttaaattttgccaaaaatgatttatccacttgcctgaaagctcgttggatataaggatcatccccttcgcctctgcgtccctgatcgccaagccatgctttcaataactgactttcagcctttgattgaatttcatcactatcatcaatctcaccagtctctttattcatacatgctgaaagccacgcccaaccacttttacaaaacagcggtaaaggtgctgatattcctcgctgatagccttcaatcaattgattcagataatctttagcgtactctgaaggtacaggagcgaaacgccattcgttgccatcacgcccatagctgcgactttcaccctcaccacctgtcagacaataagccagatgctcaatccacaattgcatgccatcattggctgtcaaactggcaggccgccaacgtagcaagccatccggttgcaccttattaatacgccctgtcagaatcaccgggcctaaattatgatgtaaatcgacagataaagtttccatttgttgttcacgaattttatccgccaaaggctgcatctctttttgctgtcttaaccaataaacctcaccaaaagcaccaaaaggtaatcctccagcagcacgcagccgattgaaaagtggttcaggcgattgctgttcaattagtgcacttaacaatagctgattaaactgataacgttgaagattatctaaaacgaaaggttcttcctccggtaattccgtttcttcaataacgaaatttactttcaagcaacgttggaaaaaaaaccgaacgggatggcggtaaaaactgctcaaattatcaagtgtaatttcttgaatttgcgccatttcaatagattggcaaaattcagcgtatgctgcaccttgttcagttgccgccggtaaccactccccggcatagctttgctgataactgcccggtataaaattttccggtgcaaatggaacgcgggcatgaagatacaacagatgttttctaacatgggtagcactttcatcaacattcagtttttcatttcccggtaaacaaaaactttggcaaacataatccagtaattcattcaccagcacggaaggattacattccgtatcatcacgaatagacttaccaatatagctgatataaagaaaccgttcggcagatatcaaagcttcaaggaatagataacggtcatcatcccgtcgttttctgtctcccctctgacctttttccgccatcagatcaaatccaagcggtggaattgaacgggggtaaataccatcattcattcccaataaacagacgaccttaaagggaatagaacgcatcggcattagagtgcaaaaattgacagatccggcgagaaaacgctgactgattttttcattatcaaactgaagtgccaattcatctcgcaataaaaccaatggcacactttcctgataacgggcattcaagccattgactatgactttctgccattgctgttctatcattgctagtactaattcagtctcattatctgagacaaaaaatgtttccagcaactgctggcagacaggtaaccaacccgttaatgcccggctctcagcaagaattttgcgccaatagcttaattgcattaaaaattcagccaattggccggcaagctccgcagctaaaccactagattcatcataaggcaatacctctttccaagggcccgatcggctatccattgcataacccaataacattcgggtcagtccaaaacgccaggtatgctgacctgtcaccggtaaagatagctcttcgacattatcgtcattcagcccccaacgaacacctgattcttcaacccaacgtcttaacaaacgcaaaccatcttcatgtatgtcaaatttattcgccagcgcgggtacttccaacaatgctaaaacctgctctgttgtaaaacggctttgaggtaaatcaagcagtgtaataaatgcctgtaaaatcgaatgtgcctgacgagctttacgatcagaaatagcaaatggaatatagcgttcaacagagacattaccaaatactgcctgaacatagggagtataactgtcaatatccgcgaccatcacaataatatcccttggcgtcagcgatggattatcttccaataatctcaatagctgatcctgtaaaacttccacttcacgttgagggctatggcaaacatggaaagataaagaacgatccaacggatcaagtactctttttttcaaactgttttcaaatgtttcttttgttgaaccaatttgggcatgatcttccagatagagaatatccctttgcaattgatgtaatagattatcctgttctaattcaacaaaagcgtgaatatccgaactctgctcaagctgcgacaataaatagagattatcacggcccaaccgtccccacgatgccaacaagggattactgacatcttgttcaccgtcaccgttaaacaatgattgagcattatcaggatctttaaaatattccagctcctgttcgctcttataatgacgtggtttacggctactcagttttgccaaaaaagcataattctgaatatctccccaataatatttacatggattggtaaacatcaggtgaatatcaatgtgccgtgccaatgcctgtaaagcttgtaaatagaccggtggtaaggcagaaatgccacagataaatacccgtttcggtaaacaagctgaaaaatcagtactattttcctgttcagtattattttccagtatcgaaataaaacgctgatacaaattagcacgatgccattgaggttgttgtaactggtgagtatatttcgtcagttccagccataatcttttctgccacaactgattatcactcaaaccatcaataagctgaccttgctgccaactttccaaccattgcgggcgataaacgagatattggtcaaacagatcagcaacccgtccagctaattgatgaatcttccgtttatcaaaatcttgatcaaggtagtgcctgagtccaacaaactctgcttcaggcagcaattgaggcaataacgccatcaatttccatgtcatagcatctttactaaaagcactttctttaggaatatcaggcaatactttggtaaacatatcccaaataaacgtagcgggaagcggaaatgaaatattagctgatatgcctattctttcggccagttggatttgcagccactgtgacatacctgggctttgtaccaaaatgacttcctgcgcaaatggatcagtcagtgggttacccccgatcaatattgctatcaattccttaagaagatctaattgattagaatgataaaccttaaacatcggaactcccatttgaacaaatcaatcggcttgctttactttgctgattataaggcgtcatcactataactgtaagctgatagcagctagacaacggataggccgtctgaaattcagcatgccatcccggtggcaatgttatttctggtaaagcattttgacctgcaattaattcatattgttccagatatccataagataatttatctgcctttgattgctgccaatgttgctgaaacccaaataataacgcctgatgataacgcattaatcccaataaagagaccgaaaaaaccataacagcaatcattacttcgggcaaactcatgcctgcttgatgctcataaaaaagctctgacttcatgaacaaaatcccacatctacctcaggacaaaaatccagccaaccactctctaccggaataagagaatcatctccaccagatgagtgtaatttcatccattgatataatccaacagattgcccgggtgccacatcagccataccttttagtagaaaaaaatgactcgattgcctttttaaacaactggtcaaatgaaattcttgttgttgctggcaataccactcttctgttttattactatcttctatttgactactatgaagtggccatgactgagcgattccccatgccaatgaagattctgcttgctgaaaagcttttagatatctgcgttcatcgaccatcatgattaaagcgttatccagatgatgatgcaaagcctttaacatcatcaggctaacggtcaataatatcagcactgaaatgagcaatacattaccttgctgatattgaaaacagacatgtggagaatgctcagccacggtacttatcccctgatattgcgcaaacgtattactgactgatattggtagtttatcgatggatgtttaaaccaatgtgcaataagtaccaatttgataaaaactaagccatcttttgccggtaatttttcagctttaaaggaatctaccactatctcatttggatcaaacagcctttcccagccattttcctgacagttacccgccccccttttccactctactgacttattgctaagacgatagccaaagaattccgattcactgtgttctggcggctcccattggttatttatattaagatcgtatgcaataatcagacatgaatcctcactctcatcacttttattatcgatgaatattggctttccatcacaataatgctgacaatatccagcacggcgaatatccttttctataatatgtaacgtttgtttaacaaaatagcctaaccgatatctctgatataactccattatttgtttagttaaaatagggtaacttttagcaatcgccagtaagataatactaccaatagccattgctacaataacctctaataatgtcattccagattggtttttatgtttcattattccaattaaagtatctcttatttatacccgtcatctttcaagttgcctctttgttggctgcactcactcaccccggtcacatagttcgctatgctcccggggattcgctcccttgccgtcgcgatccatcttgaaatccatagggtatagtgggaaaaatttaactaatcacaagctggaatttgattaaacttattattactacatgatcttatcctacctcgtgaagaaaaaataatggatatttcacctgcggaattcgccaaagtaaaactcgcaggtatcatggtgtttcttattccatgaaactctatctgatccttggttgctgaactgataataacatcctgatagggtgagtttattccctcaacattttctaaattacaattagctaataccgaattagagaacgctatgcaccaatccttgccagttttcaaccacaatatcacccttttgttcaaataatttgccaaagattgttgcctggatataaatgtcaatatcttctgtgctgattcctgtaacctgactctttcctggtgatagccccattcctgtacgccccataaggaaaatattgacaccaaaacaataacgaccattaattccaataaagaaaaacctgattgattatcaatattataatggccgattatattcacattatttaccattgataattccttatttcctttcgtaaaacattttattcattttaaacacaaaataaatacacaattaaattttatgcgagagtgcatcaataaaaaaataatagtttatcattgttacatttaaattgcgtagagcttcgcaaaaatcaacgagaatagttatttttgtttcttattattttcatacattgtaagattatatggctatgaggaagaagcttcatgaatataagatcaaacgcttttatatgataatgtcatttttattaacttattctaaatataaataatatcagaccagaaaataattaattgagaagattgtattaagtatagcgttcaatattttaaatataccctatggatttcaagatgcatcacgacggcaagggagcgaatccccgggagcatagcgaactatgtaaccggggtgagcgagtgccgccaacaaagaggcaacttgaaagataacgggtatatcagtgtatgatcagtagttggtacaagagggcaattaaatcttggtttgtgcttgcgtatgccaatatttgaatttcatccccaactacatcataaataacacgaaattgccgatctttggaaagccattggtgaaattgcattcctttatccagcaacattgaacaatagccgtatgctaacgggttctcccctatccgttccgatgattcaattaataaatcatccaccaaattctgagctgcttccaaccctatagtattagccttgtagtcttcaataatagaaagtgtctggtaggctgtttcggtaatttgaactttatatatcacacccgacgttccttgcgcctacgaagtgcttcttcaagtgtcatttttctaccttctatagtatctttcttagacaacatcgcgattttaagcaatgctatcgcctgtcgttctacgcctctttcggccaactctctctcacgttctgccattggttgaataaacaattcagatatcccgtttttggtaataaacacaccaccctcgaaatgctttggattactaagcagatccctagcttttttttgggaaatagtattcatggtctttttcctcttaatttctacgtatctgtatattatatcatcaaaatgaaaagaggaacaatttattataaattgttcctccagattgtcgacgaacatagaagcgctattttaaccgcaaccgctaaatagcaaccggggcctttattcctggatgtgggtcataatcaactatttcaaagtcatcaaatttataatcaaaaagtgatgccggtttacgctttatcaccagttttggtagtgaacgcggttcacggctgagttgtaattttgtctgctccatatggttgctataaaggtgcgtatcaccaccggtccagacaaaatcgcctacttccaaatcacactgttgcgccatcatgtgaactagcaatgcatagctggcaatattgaacggtaagccaaggaatacgtcacaggagcgctggtaaagctgacaggaaagtttgccatccgcaacataaaactggaagaaagcgtggcatggcgctaatgccatcttatccaattcaccaacgttccaagccgaaacaataattctacgtgaatctggatcgcttttaagctgttccagtacagttttcaattggtcaatctggcggccatctgcggtaccccatgcgcgccattgcttaccatataccggccctaaatcaccgttttcatccgcccattcatcccaaatagtcaccccattttcatgcagatatttaatattggtatcaccattcaagaaccagagaagttcatgaataattgagcggatatggcaacgtttagttgtgaccagtggaaaaccatcctgtaaattgaaacgcatctgatgcccgaaaatcgagagtgtccccgtcccggtgcggtctgctttcggagtgccctctgcaagcactcttgtcattaagtccagatactgtttcattttacctcttgtaccttattaccttggtgtttatatgcccatatcatcattaatattcccgccaggatcattggtatagaaagaatttgccccatactgatcccgtcgaataagcccagttgtgcatctggttggcggaagaactcgactatcactcggaaaataccgtagccaattaagaataaaccggaaacactgcccattgggcgaggtttacggatatataaattcaaaataatgaacagaacgatcccttccaacgccatttcataaagctgtgaagggtgacgtggcagaacaccatattgctcaagtactgataacagtgagggatcggttgcagccaatgcaatatcttcaccacgggagcttgggaataacatcgcccacggcgtatccaatgtgacacgtccccacaactcgccgttaataaaattaccgattctccccatgcctaaaccaaaagggactaacggggcaatgaagtcagcaacttgtaagaaatggcgtttcgttctgcggccaaaccaccacattgcgcagataacccccactaaaccaccgtggaaagacatcccaccatcccaaactttaaacaaataaagggggttgtcgagaaaggcagggaaattataaaacaggacgtagcccagacggccaccaacaaatacgccagcaaaacctgcataaagcaagttctctacttcgttttttgtccaaccactattgggtttcgctgccctgcgtgtcgctagccacatggcgaatacaaacccaaccaagtacatgaaaccataccaatggagggctattggacctattgaaaaaatgaccgggtcaatattaggaaatgccaggtagctgttactcatctttccccacttaatatttagcgttaatgccctaaggcaagtgattgagaatcatagcacaggccgttaaacggattaaatgccacctctgaccaaaccgcccaccccatgctgctccataaatgttgctgacagctccttcactcttaggctggtttcagcttgtaggatttcggccattaatttttcaacctgagccaactccagatgacgtaataaatatttaattcttggcacactacaaccactcatactcaaactgcgatagccaagaccaatcaataacagcgctcccatagggaaacttgccatttcaccacaaatgctgatcgtaagacctgcccgctggctattttcaaatactagttttaatgcccgaatcaccgccggatgtaggcaatcataaagagaagcgacgtgagtgttattccgatccactgccaatagatattgtgttaggtcattggtgccaatagacacaaaatcgactctgtttttgagttgtggcaacagaaaaatcatcgaaggaacttcaatcatgacaccgagctgaggcatagatatttggcgcgccagcatttgctcaacttcctctttcgctctgtctaccaatcgcttagcttcatcaatttcttctacactcgtcaccattggcagcaggattttcaggttacccatatcagcgttagctctgagcattgcccgcagttggataagaaaaatttccggttgatccagcgtcactcgtataccacgccatcccaaacaagggttctcttcgctgatcggcatataaggcagttgtttatccgcaccaatatcaagtgtacgcagtaccaccggtttatcgggaaataattgtaacatctcctgataacgcgctttttgttcatcttctgatgggaaaccacagtgcagcataaagggtatttcggtgcgatagagtccaacaccatcaatactattactgatctgcaactcatatttcaggctcaaacccgcattaagctgaaccaaaatgcgctcgccactttttaaccgtgcttcctgctccacatctccctcagccaatctgctaagtgccttttcttcttcgataatctgtttatattcctgcgaaatcagtggctcaggttcaatgaagacttccccacggaaaccatcaagaattagcatacgattgttcaggagttccggctggatatccgcccccataatggccggaatacccattgctcgaaccaatatggcagagtgtgaatgagttgcgccatcacgaacaataacccctgctaatctttcctgcggcatttctgccaataggttagcactcagttcatctgcaaccagaatgaaccattcaggccattgatgactggcagtaagtgaatcatccagatgaaataataatcgctgtccaagtgcccgtaaatctgatgctctttcccgcatataagcatcctgcaagctggaaaattgttctgcgtatttctcaataacttgtttaacggcccattgcgcaacagagccctgttcaacacaggagaacagatcttgtttcaactggggatcattcaaaaggtaggaataaagatcaaaaatcgcggcgctctctttttgagaacccacagtaaaacgtttactgagccgacgacattctgctattgcatcttccagtgcctgaattaaacgagaacgttctgctgcatgatcaagagttgaggcttcaaaaatttggtcaagtgagggctgggagcaatcttgccatccctgagccatcacgatgccattggaaattgccaaggctttaattctggtctgccgatatcgaccaaacaagcctttagtctgagcttgagcaaggatcaccgcgagttgtgtcgcaagcgtcaccataaaggactcttcggtttcattaaacaagcgttgttcctgctgctgaacgaccaaaacaccttgcaattgacggcggtaaaccacgggaacgcccaaaaaagcgcgaaaactatcctctttaacttgaggcaagtatttgaaacttggatggctgcggacatccgccagattaatcagttcagacaattgaccaacttgcccgacaacgccctcaccaaaagccaaactgatagcccttcctcggggtttcctcaaccctctagttgccatcaggtaataacaccgccgttgatgatcagcaagatagatagaacagacatccgtgttcattgccagacaagtctcgttcaccaatagctcaagcgcttcggccagattggttgccatagcaactttttcaacaatttcccgtaaacgcatgagcatggaactcacctaacttcttttacgacggtaagaatacgaagaacgtggcagagatacgctttcctgcattggcattacaaccgaagcaaactctttcatcacgcgccgataaacatcacgcttaaaagagactacctgccgaacaggataccaatagctgacccaacgccaaccatcgaactccggggtattactgtgttgcacattaatatcttcttcattacagagcagttgtaataaaaaccatcgctgcttttgaccaatacagacaggtcgtgtatcccaacgcaccaaacgcttgggtaatttgtaacgtaaccaattacgagtagaggccagaatgcgtacatctttccgacctaaccccacttcttcatacagttcccggtacatagcctgttctggtgattcccccggattaattcccccttgaggaaattgccaggaatgctgcccataacgccgggcccacaaaacctggccttgccgattacaaattacaattcctacattcgggcggtagccatcatcatcgatcaccagactacctcgataaactaaatttgaaagatgactaattgtttcacactaccctcaagtggtaaacctctatcattggactttgcagtcgctagctaaatctctacaatagcgccatctcaacggggtgctggctgtttaaaacagccttgctgagagtaaacccgccgaacctgatccggctaataccggcgtagggatttgagctgctaactatttcacagacgttatcttgccgtttagcgcttcctcaaatcctttgccaatcctcttaatttaaggagagcaaagtgtttaagacgttattttccaaattaatcgtactggcagccctatcagctcctgcgttgctattaagtcaagttgtacaggccaagccagtattaacggtctatacctatgattcttttgccactgaatggggacccgggcccgcaattaaaaaagcatttgaagctgaatgtcactgtgaactgaaactggttgctctggaagacggtgtttccttgctcaatcgcctaagaatggagggcaagcgtactgctgccgatattattcttgggttggataacaacttgattcaagcagcccaacaaacagggctgtttactgaaagtcaagtggataccagcaaactgacactgccagtgtcatggaataacaaggtattcattccttatgactatggctattttgctttcatttacaacaaaaagactttaccaaacccaccaaaaagcatggatgagctcatcaacagccacaataactggaaagtgatctatcaagatcctcgcaccagcacaccggggcaaggtttgctgttatggatgcagaaaatttacggtgatgatgccccacaagcctggcaaaagctggcaaagaaaacactcaccgttaccaagggctggagcgaagcttatggtctgttcctcaaaggagaaggcgatctggtgctgagttacaccacttcaccgggttaccacctgttatctgagaagaatgacgattacactgcggctacattcagtgaaggtcattaccttcaaatcgaagtggccgcacaactggcctccagcaagcaaccggaacttgcccagaaatttatgcagtttatgctgacgccaactttccaacaggaaattccaaccactaactggatgtatccggtcattgatatcccactcccggaagtatatttgcagctttccatacccgaaaaatcgctacaatatcgcgcggaagaagtcgcaaaataccgtaaccaatggattcgtacatggcaaagcgctgtcagccgctgatagccggatggctgttaccgggggcgattgccgccggttttttactgttggtcgccttactggcattcggaacgctctggtttaattcacctgcaagtgattggtatttattgatagaagatcgctatttgtggcacgtggtacgtttcacattctggcaagcctttttatcagcactattttctgtcattccggctatttttctttccagagcactctatcgccgtcattttccaggccggaccctctttctgcgcctgtgtgctatgacgctggttttgcccgtgctagtcgctctattcggcattctggcggtttatggtagaaccggctggctggctcagttctgcaaatggatcggcatcgattaccctttcaccccttacggtttatcaggcattttgctggcacatattttctttaatatgccactggcaacacggcttttactgcaatcgctggaaaatattgcggtggaacaacggcaattagcggcgcagctaggtatgaatgaatggcaacatttccgttttgttgaatggccttatctacgccgccagatcctgcccactggtgcactgatttttatgctctgtttcgccagttttgcgactgtgctggcgttaggtggcggacctgctgcaacaactgtcgaactggcaatctatcaggcgttaagctatgactacgatctcaaccgtgccgcgttactggcgttgattcagattacctgctgccttggccttgtgctcctcagtcagaaacttaacagtgctctatctgtcggctacagcaaccaacagcaatggcgtaatccacaagatactctgttgagaaaaatctgcgacagcttgttaattatcgccgcattattactactcgtgccaccattgctggccgttgtcgtggatggccttaacagcgggttgcttaatgtattacgccaacctgcattgtggcgagcctttatcacctcagcggtgattgctttaggcgcggggttattatgcgttttattcactatgatgctgctgtggagcagccgtgagctgtacctgcgtcattccccccattggggacaagtaatggagatgagtggtttgttaatcctctctatgccaggcattgtattggcaacaggattctttctgttgctcaatgataccgtcggcttgccccgttcaccctacggtctggtgattttaaccaacgcactgatggcaattccttatgcactgaaagttctggataatccaatgaaagatctggcggctcgctataatccactgtgtcgctccctgaatatccaaggtattaaccgactgcgctggattgaactaaaagcactaaaagttccgctggcacaagcactggcctttgcttgtgtcctttccattggagattttggcgttgtcgcgctgtttggtaatgaagatttccgtaccctgcccttctacctctatcagcaaatcggggcttatcgtagtcaggatggcgcgatcactgctttattgctgttattgttatgttttacgctgtttagtttacttgaacgcttaccgagaccacgtaatgctcaaacttgaaaatctgacttaccgctatgaacatctgatgatgcgctttgacttacacattcaggccggagaacgtatcgcaatcctaggccctagtggggcgggtaaaagtacactcctgaacttaatcgccggctttcaaacagcagaaaaaggctccctatggctgaacggagaaaatcataccagcacatcacctgctcaacgcccggtttccatgttgtttcaagaaaataatctcttctctcatttgacaattgagcagaatatcgggctaggtttacatcccggattacgtctcaatagcacgcagaaacagacattacagcaaatagtctcacaagtttcattggaagattgtctgccccgtctgccagctcaactttctggtggacaacggcagcgggcagcattagcccgttgtctagtacgccaacagccaattttattacttgacgagcccttttctgccctagatccggcactgcgtaatgaaatgctggtattgctggaacaagtttgccatgaacgccaacttacattactgatggtttcccataatctggatgatgccgctcgtatagctgatcgcgctttattaatcgttgatggcaatatccattatgacggcttaacaaatacgctggttgccggcactgttcctgaagcagctattctaggcatgaaaaccgatgctatataggcatggttaatactaaaaatctggaagcagtacgtactggctgtgccagtctaacgctaattttccagaaacaactgtattcactggtttttaaccgaaatccttaccataaatttattttcaccatattatcagtaccctggaaggaaaatttgatgataaactaacctactgtaaaagattaggccgtaaactgtctgactatcagcacaatgtaccgccacatgagagaacagcaacgctggcagataagtaaaatctgtaatatcaccggtctttgccgtatcaaaatagtggcaggataagctatgtcatgacactcttcgagccagaactactggaaaatctgcatttatcaccggactatgatcacgatattaaccagcaaattcagcctatcgctgatgctatcctgccgctttacaggatgactttacaatttcgctcaccggacagatagtaacgccttttggctgatgactattttttgcaggtgacgactggctttgcttccattaacatatcgcccctttgacgagtgataagggaaataacggggtgtcttgctgtctgcccattatctccgttaaatcaaataaaaagctgtcgtcctccacccatgaataacattatctaacagaaactgagttaaaatttatgccatttaccctcggtcaacgctggatcagcgatacagaaagcgaacttggattaggaaccgttgttgcactggacgcacgaatggtcactttgctctttcctgccagcggtgaaaaccgcctctatgcacgcaatgattctcctattacccgtgttatgtttaactcgggagatgttgtcaccagccatgaaggctggcaactcaaagtagatgaaatccaacaagaaaatggcctgctgatttatacgggcacacgacttgatactctggaagaaaatatcagtctgcgcgaagtgttccttgacagtaaacttaccttcaacaaaccacaggatcgcctgtttgctggtcagattgaccgtatggaccgctttgccttacgttttcgcgcccgtaaataccaaagcgaacaatttaaactggctgaaagtggtttgcggggtatccgcgcaagcttgatccctcatcaacttcacatcgcaaatgaagtcggcaagcgctacgcaccaagagttctgttagccgatgaagtcggtttgggtaaaaccatcgaagccgggatgatcatccaccagcaattgctggccggtcgtgctgaacgtgttctggtgattgtgccggatagtcttcaacatcaatggttggtagaaatgctgcgccgtttcaatttgcgctttgccctgtttgacgatagccgctatatcgaagcacggcacgatagcgataatccatttgaaacagaacaattggtactctgttcactggattttgcccgccgtaataaacagcgttttgagcatatgcttgaagccagctgggatttgatggtggtggacgaagctcaccatctggtctggagcgaggatgcacctagccgtgaatatcaggttgtcgaacaattagctgaacagatcccaagtgtgctgctattgactgcaacaccagagcagctaggacaggaaagtcattttgcccgtctacgcctacttgacccaaaccgtttccacgattatcagacttttattgacgaacaacaaaaatatcgtccagttgccgatgctgtcacactgctgttatcaggtgaacaacttaataataatcaattaaacctaatgggtgagttgattagtgagcagaatattgagcctctgctgaaagctgccaatagtaatagtggtgaaagtgaaactgcacggcgtgaactgatttccatgctgatggatcgccacggcaccagtcgtattctgttccgtaatacccgtaatggtgtgaaaggcttcccccatcgggaattgcaccagataaagttgcctctgccatcccaatatcagaccgccattaaagtctccgatattatgggcgctaaaaaatcgctggaagcacgcgcatgggatatgctctatccagaacaaatttatcaagagtttgaaggcgaaaacgctacctggtggaactttgatcctcgcgtagaatggctactcggttttctgatggcaaatcgccatgaaaaagtgctggtaatttgtgcgaaagcaaccaccgctctgcaattggaacaggtactacgtgagcgagaagggattcgtggtgctgttttccatgaaggtctatcactgattgaacgtgatcgcgccgcagcctattttgcttccgaagaagaaggagctcaggtattactatgctccgaaattggctcagaaggccgcaacttccagttcgccaaccaattagtgatgttcgatttaccattcaatccagatttactggaacagcgtatcggacgtctggatcgtatcggccaaagccgtgatatccaaattagtgtgccttatctggagaataccgcccaagcagtcctgattcgttggtatcacgaaggtttggatgcattcgagcatacctgcccaaccggtcgtactatttacgatcactattatgaagctctgctgaactatcttgccaaacccaataatcaggaccaagaaaaatttggtgaatttattgatcagtgccgtcagcaacatgagcaactcaaacagcaactggagcaaggccgtgaccggctgctggaaatgaactccaatggcggcgagcatggtttgcgactggcagaaaaaatttcagagtatgataatgatactgaattggtgaacttctctctcaacttatttgatatcgttggtatcaatcaggaagatcgcaatgacaatatgatagtgctgacaccatccgatcatatgctggtcccagatttccctggattaccaaaagatggttgtactatcacttttgatcgtgaacagtcactgtcccgtgaagatgcccagtttatcagttgggagcacccaattatccgtaatgggttagatctgatcctttccggtgatacgggtagctgtgcagtatcccttttgaaaaataaagcattacctgttggaaccctgctggtagagctgatctatgtcgttgaagcacaagcccctaaacgcctgcaattgacccgcttccttccaccaacgccattgcggatactgatggacctgaaaggcaataatctagctgatcaagtggagtttgaaagctttaaccgccagcttaatgcagtgaatcgtcatactgcaagtaaactggtcaatgcggtacaaaaggaagttcacgctattttgcaacaagccgaaggtttagtcgaaactcaggcaaaatcattgattgaacaagcagaacaggaagcagatgaaaatcttgctgctgaactttcccgtttggaagcattgaagacggtcaatccaaatattcgtgatgatgaattggaagccattgaagccaatcgccaacagttactgcttaacttaaatcaggcaagttggcgtctggatgctattcgccttgttgtcgttacacatcagtaaatattagtaatacccggaggctggaccgggatagggtaacctttactaagaaccctattcccgcgcctcccctaatattcagctaccggagcctcaatggaagcttataatcctcctaccgatccttggttacatgtgctctatcaggatcaatatatcattgtggtcaataaacccagtgggctactttctgttcccggtcgggcagcagagcataaagacagcattatgacgcggatacaacaacagtttccagccgcagaatctgttcaccggctggatatggcaaccagcggcgtaatggtagttgcactgaccaaagatgcagagcgtgaattgaaacgtcagttccgtgaacgagagccggaaaaaacctatattgctcgggtttggggacgtctggaaccagaaacgggtcttgtcgatttaccgctgatttgtgactggccgaatcggccaaagcagaaagtgtgttttgaaaccgggaaatcagcccagactgagtacgaagtactcgcttacgaagatgaggcaactcgaataaaactctcaccgatcactggtcgttcacatcagctcagagtacatatgctagcacttgagcacccaattttgggagaccagttttacgctcatcagcaggcaagagcaatggcacctcgcctgcaattacatgcacaagagttatatatcacacatccggtctatggaacgccaatgcattttcagtgtaaagccgatttttaattaatagacaaatacagtaaccgaatccaatgaagccaatatcagacacaaggccaagccacaacaagccaaaagaacacggatatttgccattttttgcattcctcctaagttaaaacaaaataaaacataaaatattctaatattttagaggaataaaaaataaactcaacagccgtaggggatgttattcccctatacatttagtggcatgtttttaaaaataaaaaatgggctatttaaaacccttctcttttttaatgagatcataggcagcctgaattgactgggccttttgtttagcaatctccatcatttccggtggtaaaccttttgctaccagcttatctggatgatgttcactcatcaatctacgataggcacgcttaattgtcgtcgcatcatccttttcacgcacccccaacaccttacaggcgtccgcgagtgttggcccctgcgcagccttctgataaccgccatactgccgttgctgccactcgcctccatcaccgaaattgcggccaccttccatcatggcaaggaattgttcgaattggttacgagagatcccaagttcatcagcaataataaacaacaccgtcctctcgttcggatgcaattgaccatcagaaaatgccgcctgtaactggatctccaaaaacatgcgaattaagtcagaccggccaaaacaggctcgacgcaattgtcttagtgtctcacgcaaaggaaaattgggctctttaccttcacgaaaagcctgctgtgccgcaatcctagcttgcccgtgaagttgcattcgttccattaactggctcgcaagccggatatccgtttcagtcacccgcccttttgatttagtaatatggcccatcacctgaaaagtactgctgaaaaatagcagttggcgagactgattatttgcaaaaaaaccttggtttccccgtacactagccctatcaagcatatggccaataaatagaccaatgacaataccccagaagcctgctccagacacaacaccaaagatcagcccaagcaattttccccaataatgcatatactcctcaattcaccaatgctctgagtgtagttttgcattatcatactattcattcagctctgtgcctaacgacaagatataccctatggatttcaagctgcatcgcgacggcaaaggagcgaatccccgggagcatagctaactatgtgaccggggtgagtgagtacagccaacaaagaagcaacttgaaagatgacgggtataagtaaaggtatgactttacactggcgtatattcattgagtacgctagtctcttgaggtttgcccggcataatgccactgatgacggaaccgcataaatatctatgaagaaatgttatccaactttgctggccacaacggtatgggccgcactttatggtcagtatgcacatgctgatctcgcagcgcagtgtatgctgggtatacctgtttatgatcagccaatcattaatggcgatttaaatcaacttcctatcaatattctggcagatgattcacgcgcagattatccgcgttccgctaaatttatcggtaatgttaatattaaacagggtaataaaaccctgactgccgatcaggtacaacttgatcaaacagaagataaagttccgttaagaaccgtaactgcaacgggcaatgtccattatgatgatcccctgattattctgaaaggtccacgcgcttggtctaatttaaataataaagataccgatatgtatcaaagtgattatcagatggtcgggcgtcaaggacgcggcaccgcagacaaaatgaaactgcgtggtgaaaaccgttatgccattctggataacggtacttttacttcctgcctgccgggtaatgatagctggagcgttgtcggctccgaagtcattctcgatcgcgaagaagaagtggctgaaatatggaatgcccgtttcagggtggctaacgttcccatattttacagtccgtatcttcaattaccgatcggtaataaacgccgttccggttttcttattcctaacgccagctattccaaaaatgacggctttgaatttctgctgccttattattggaatattgcaccaaattatgatgccacaattacaccgcactatatcagtaaacgtggtttaaaactggataatgaattccgttacttaaccaaagcaggcacaggtacccttgctctcgactggctgaataacgacgaacagtatgtcaaagacaaaaagacaaacacacgtaccgccagagaaagtgataatcgctggttattttattggagacacagtggtgtgatggatagggtatggcgttttaatatcgactataccaaagtcagtgatcccgaatatttttctgatttcagctctcaatatggttccaccaccgatggctatgccacacaaaaatttagtctgggctatgctcaacaaaactggaatgccacgctatcaactaaacagttccagattttttctaaagataccagtagaaaagcttacagagcagaaccacagttagatttgaattattacaaaaacgatctgggtccatttgaccttaaagtttatggtcaggcggcaaaatttaccagtgtaggtaaaaataacccggaagcaacccgctggcatctggagccctccattaacctgccactctccaatggttgggccagtatgaataatgaagttaagctgatggcgactcactatcagcaggatattcccaaagctaccgagaatgctgaatataaagaatctgttaaccgggttctgccacagttcaaaagcgaagccaaaatggtatttgagcgttcaacgtacctgaacaacaattacacccaaacgctagaaccgcaggttcagtatctgtatgtgccatacaaagaccaagataatatcaataatttcgactcatctttactgcaaactgattacaacggcctgttccgtgaccgcttttatggtggcctggaccgtatttcatcggccaatcaagtgactaccggtctcactacccgtatttatgatgaaagtttggttgaacgttttaacctgtcattaggtcaaatctattactttgaacgtccacgcactggtaaagaaaccatcatcaacagtaaagatagtaccggcatgatgacctgggcaggtgatacttactggaaaattaatgattcttggggcttgaaaggtggtatgcagtacgatactcgcctgggcaacgtaacgatggggaatgcagtactagaatatcgccgtgatgaagaccgactggtgcagttgaactatcgttttgttgacagagattatatccaagctacagctaagagtgctccggctttccagcaagggatctctcaagtcggtctggttgcaagttggccgttaagtgagcgctggggtttagtaggtgcttactattacgataccaaagaacagcaaccggcaagtcagttagtagggctacagtacaacacttgttgctgggcaattaatgttggctatgaacgtaagattgttggttggaaagacaacaatagcgaatatgacaacaaatggtcatttaactttgaacttcgtggcttaagtaacaatcatagtctgggtagcagaaaaatgttgcagtctggcatcatgccataccaacgtgcattctgatgccaataaaggtttgatattaaacacgataaacccgctattgcggaacctacatatgatgggaaaagtatgaagaactggagaactctcatttttggattgatgttttcagtgagtactgccttcgctgcacctcagcaaatggataaaattgctgcggttgttaataacggggtggtactggagagcgacatcaataaccgcttacaatctgtcaaacgggatgcgcaacatgccggccagcaaataccggatgagcaaacgctacgtcatcagatccttgagcgtctgattatagataatatcctgctacaaatggcaaaacagatggggatcaccattcctgatcaagcattggattctacaattgccaatattgcagcccagaaccacatcactgtggatcaaatgaaacatcgcattgctgctgacggaatgaatttcgatacttaccgtgatcaaatccgtaaagagatgctgatagcagaagtgcgcaataatgaagtccgccgtcgtgtcaccattttgcctcaagagatcgacgccttagttaaacaaattagcaaccagaatactaacgatactgaactgaatatcagccacattctgatcccattgccagaaaatcctgatcaggcgcagatggaaaaagccatgacggtagtgcagaaaattatgtctgaacttaaacatggtgttgatttcggtaaattggctatcgcctattctgccgatccacaagcgctgaaaggcggtaatatgggttggagtaggcttcaggagttaccaactctgtttgctgaacaactgcaattagctcagaaaggtgccgttgttggcccaatccgttctggtgttggtttccatattctcaaagttaatgatatccgtggcggtaatccaaccatcgccgtcactgaagttcatgcccgccatattctattgagaacttctcctgtcatgaccgatgatcaagcgcgcaccaagttgcagcaaatcgccagtgacattcgcagtggaaaaactgattttgccgatgccgccaaagagttttcagacgatccaggctccgccctgcgtggtggtgatctcggctggacggctcctgatatctacgatcctgctttccgtgacgcattaatgcgactgaacaaaggtgaaatcagtcagccagttcactcatcttttggttggcatctgatccaactactggacactcgcaaagttgataaaacagatgtcgctcagaaagatcgtgcttaccgtatgttgttcaaccgtaaattcaccgaagaagcacaaagctggatgcaggaacaacgcgcctcagcttatgtgaaaattttagatggcaacgatgcacaacaataaaccgattattatcaataaaccaattgttattacccccggcgagcctgccggggttgggcctgatttaacagtggctcttgctcaacaaagttggccaatgcaattggtcgcttgcgcagaccccaacctgcttctcgacagagccagacaacttaatttacctttgcaactacaagaatattctgctgacaaaacccccgagccacaggctgccgggacattgacaatactgccagttcctcttcatgtgcccgcaatcgctggcgaattgaatcaagaaaacggtagatatgtcaccgaaacactggcacaagcttgtgacggttgtttaaacggggaattttcagcattagtcacagggccagttcataaagggaatatcaatgatgccggcgtgccttttatcggccataccgaattctttgccgatcgcagtggatgccagcgagtcgtcatgatgcttgcgacagaagaacttcgggttgccctagcaacgacgcatctacccattgttgatgtaccaaagtccatcactttcgatagtctgcgggaagtgattactattcttaaccatgatttaaaaacaaagtttggcctggcaaaaccccgtatttatgtttgcggtctgaatccccatgcaggagaaggcggccatatgggacgggaagagatcgatgtcattattcctgcgttagccagtctgagagcagaaggtatcgtgctggaaggccctttaccagcagataccctgtttcaacctaaatatcttcaacatgcggacgccgtgctctcaatgtatcacgaccagggattacccgtgttaaaataccaaggttttggcagagcagtgaatattacattgggcctgccgttcatccgtacttcggtcgatcatggcacagcattggaactagcagggacaggtcaagctgatgtgggaagctttatcaccgcattgaatttagcaattaaaatgatacaaaacagtaatgaataatagagtccaccaagggcactttgcccgtaaacgtttcggtcagaacttcttaaccgatcaatttgtcattgatagtattgctgccgctatcaatccacaacccggccaagcagtgttggaaattggccccggtcttggtgcattgacagaaccggtcggcgaacgtatggataaaatgaccgtggttgaactcgaccgcgatttagccgcacgtctacaagttcatccacaattaaaagataaacttaccatcatccagcaagacgccatgacggttaattttggcgaattgtctcagcaaagagggaagccgctacgcgtctttggtaatttaccttataatatttccacgccgttaatgttccaccttttcagctatactgatgctattgctgatatgcattttatgttacaaaaagaggtggtgaaccgtctggtagctggccccggaagtaaaactttcgggcgtttaagtgtcatggcccaatattattgtcaggttatccctgtgctggaagtaccgccaaccgcgtttactcctgcacctaaagtcgattcagccgttgtacgtctggtaccgcacaaaagcataccgcatcccgtcaagaatattcgtatgctgagccggatcacgactcaagctttcaaccaacggcgtaaaactatccgtaacagcctcggtgatctttttactgtagaacagctcacagaacttggtatcgatccaagtactcgtgcagagaatatttctgttgaacagtactgtaaaatggcaaactggctatcagaacaacctgaaatgcagtcataacaggagtcaattatgattaatacgcccagggtttctattcaggtacaaagtgtttatgtagaaagccaatcgtgtcccgatcaacggcgtttcgtttttgcctatacaattactattcgaaatcttgggcgcgaacgggtccaattaattaatcgttactggctgattaccaacagcgacagccatcaaacggaagttcaaggggaaggtgttgttggtgagcaacccataatccagccaggtaccgaataccgttacaccagcggggcgatattggaaacgcccttgggtactatggaaggccattatgaaatgattgatcacaatggtgaaccatttcgcgttgctattccggttttccgtctggctatcccaacgctgattaattgattatgtctacatatctcattggtgatattcatggctgctaccgtgaattgcgtgctttattaactaaggctaattttgatcctacaaaggatacattatggttaacgggggatttagttgcccgaggcccagactctcttaaagttctccgatatgttaaacagttaggttcagccgcaagaatggtattaggcaatcacgatctccatttattgggcgtttatgccgggatcagccgtaataaacctaaagataaaattgatacgttactgtctgcaccagatgccgatgaactaattaattggctacgcaaacaaccgttactacagttcgatgatgatttaaaactgctcatgacacatgccggtattacgcctcaatgggatttggaaacagccaaaatgtgcgccagcgaagttgaaactatgttcaacagtagctgttaccctctgtttctcaattccatgtatggggatatgccaaacaactggtcaccagaactctctgggctggcacgtttacgtttcagtactaatgcattgacacgtatgcgttactgttttccaaatggtcagttagacatgttgtgcaaagataaacccgaaaatgcgcctgcaccgttaaaaccttggtttgaactagaacggcaaatcccaccagagtatgccatcgtttttggtcactgggcatcattggaaggccagggaacacccgatagcttttatgcattggatacaggctgttgttggggaggacaactgacgatgttgcgttgggaagataagcaatattttacacaatcatcgttaccggcagtaaaacagcattaagccagacacgccgtgaaaaaagctcatcggcgtgttctatcagttagagacgacgttgtaaaatctcaaaacagtagctgtgagaatttaattcatcggcatcatggtactcagtaaattcagaatcccattcatccggttcatagtcaggaaaatgcgtatcacctatcacttctgcatcgatgtgagtcaggtacatacgactcgctcgtgaaataaattggtcataaactttaccaccacccatgaccataacctcttctgcatcacctgctacagccagtgcttcatcaactgaactgacccaagttacacgctcgtcattacccggctgattactcaatacaatattgagtcttcccggcaacgggtgacctatagattcataagtcactctccccataataacgggtttattcaatgtattacgtttaaaccaggctagatcccccggtagattccacggcattttattctccatgccgataacccgatccatagctaaagcagcgatcaagctgatattcattaagccaccttattaggcaaatagtataaaaattgatgacactatacggaaagggatgtacccagtcgataggctcaacgctttcttaagtacaaaagattaatttatacttggtttattacttaagacatttattgatcaaaataataacaaagctaatattaaccatagggtacattatgctggaaacatcactagtcgtcatcattatctcaacgttgggtatgctctctcccggccccgatttctttctggtagtcaaaaatgccatacgttatcagcgttctgctgccatgatgacagttgcgggcttaatcgccgctatcacttgtcatatggcttactgtgtcgccgggttagctattgttatcaccacaacgccgtggctatttaatctgatgaaatatgccggagcggcttatcttatttggatcgggatcaatagcttgctttctcgcggaggcaacagcattctcccagacaatcagccacgacagattatcactttcaaaaaagcgtttatgcaggggttcttatgtaatttgctcaaccccaaagcaacgttgttcttcctggcaatatttactcagttgctaaatgtcaattctggtgttggtgaaaaattatggtatgcctctattatctggggattgtcagtcatctattggccaatattagtcatattgattcaaagtgcaccggtacgccgcggattagctaaggctcagaagattatcgataaattactaggcattgttttgattggattaggtgtcaaagtagcactgggataacagacagtgattctttctctttaatttttcagtaaacataaaaaagtgcgctaaacagagcgcactttttattacttcaattaatcagaatagagactaactattaatcatcgcatgcatttcctgtacagaaatcacctgctcagttggatcggcactcagtgccattgtggtagcaaatccaccatttaatgtggtgtcataatgcactttatattgcagtgcactacggcgaataagtttggaatcctcaatcgcctgacgacccgcagtcgtgtttacaatatagctatattcaccatttttggttctatcctgaatatgcggacgcccttcgtgaactttattcaccagacgagggttaatccccgcttcacctagcacaaccgcagtaccgtgagtcgcatccagttcaaagccctgtttcagcaatttagcggccaaatccacaacccggcctttatcaccttcacgcacggacaaaagtgctctaccattttgcggcattctggcgttacatcccaatagtgcctttgagaaagcttcggcgaatgtacgcccaacccccatcacttctccggttgaccgcatttcaggcccaagaatcggatctacacctggaaatttgttgaaaggtaatacaacttctttcaccgaatagtatggtggaatgatctcctgagttgcatcttgctcaaccagagattgaccaaccatcacacgagccgcaacttttgccagtggtaaaccggtcgctttagaaacaaatggcacagtacgagccgcacgcgggttgacttcaatcagataaacttcgtcatccttgacggcaaactggacattcatcaagccccgtacacccaattcaaatgccagcttttctacctgctggcgcatgacatcttggatttcctggcttagggtgtaagcaggcagtgaacaagctgagtcgccggaatgcacaccggcctgttcaatatgttccataatgccgccgatcaatacacgctcaccgtcacagatagcgtcaacgtccacttccacggcatcatcaaggaaacaatcaagcaatactggggcatcattagagacattgactgccgtctggaagtaacgacgtaggtcaacttcgtcgtatacgatttccatcgcacggccacccaaaacataagatggacgaaccactagcggataacccagaatatttgccttctcaactgcccgttctatcgtggtcacggtggcattttcgggttgtttcagaccaaggcgatttaccgcctgtttaaaacgttcacggtcttccgcacgatcaatcgcatccgggctggtaccaataatgggaacaccggcgatttccagttcacgagctaatttcagcggagtctgcccaccatattgaacaatcaccccttttggctgctcaacacgcacaatctcaagaacatcttccaaagtcaccggttcgaaatagagacggtccgaagtatcgtaatctgttgaaacggtttccgggttacagttcaccatgatggtttcatacccatcttcacgcagtgccaaggccgcatgaacacaacaatagtcgaattcaatcccctgaccaatacgattagggccaccacccaataccatgatttttggcttgtcactattcggattagcctcacactcatcttcataagtggaatacatgtatgcagtatcagtcgcaaattctgccgcacaggtatcaacgcgcttgtaaaccggatacagattatatttgtggcgtagtttgcggatctctttttcggccacaccgaccagtttcgccagacgtgcatcagcaaaacctttacgcttcaaatagcgcaggaagtcagccgtcaagctgttaatgccctgctctgctacttgctcttccaatcgcacgagttcttcaatttgcactaagaaccagcgatcaatatcagtcaggttaaaaacaccatcaacagacatacccgcacggaaagcatccgcgatataccagatacgctcagcacctgcatcttttaattcgcgacgaattttagtcaatgcttctggatcatctaaactgactttcgggtcaaaaccggttgcccccacttccaaaccacgcaatgctttttgcagagattcttgctgagtgcggccaatcgccatcacctcaccaacagatttcatctgggttgtcagacgatcattggctccagcaaatttctcgaaattaaaacgaggaattttagtcactacgtaatcgatagaaggttcaaaggacgctggcgtgcgaccacccgtgatatcattcatcaattcatcaagggtatagcccacagccaatttagcggcaatcttagcgatcgggaaacctgtcgctttcgaagccagcgcagaagagcgagaaacgcgtggattcatttcgatgataactaaacggccattttttgggttcaccgcaaactgtacgttagatcccccagtttctacaccgatttcacgcaataccgccatcgaagcgttacgcatgatttgatactctttatccgtcagcgtttgcgccggagcgaccgtgatggaatcaccggtgtgaatccccatcgcatcaaagttttcaatagagcagacaataatgcagttatcgtttttatcccgcacaacttccatttcatactctttccaaccaatcagcgattcatcaatcaaaagttcgttggttggtgaaagatccaggccacgctcacaaatttcctcgaattcttcacggttataggcgatgccaccaccgcttcctcccatagtaaaggaagggcggataatacaaggaaaaccgacttgatcagcaactgccaacgcttcttccattgaatgggcgataccagaacgcggagtttccaaaccgatctttttcattgctatatcgaaacgacaacgatcttccgctttatcaatcgcatctgcggtagcaccaatcatggtaacaccaaactcttccagtactccctgacgctccagttctagcgcacagttgagtgcagtttgtccgcccatggttggcagaatcgcatcgggacgctctttttcaatgattttacgtaccacttcccaatggatcggctcaatataagtggcatcggccatttctggatcagtcataatggtagcagggttcgagttcaccagaacgacacgataaccttcttcccgtaacgctttacaagcttgtgctcctgagtagtcgaattcacaagcctgaccaataacaattggacccgctcccaggatcaggatacttttaatatcagtacgttttgccattttattttctcctgattacttggtgttatgacgattatttttctgacaatactgctcaatgagttcaataaagtgatcaaataacgatgcagtctcatgtggaccggggctagcttctgggtgcccctggaaactgaatgcaggtttatcggtacgatgaatcccttgcaacgtgccgtcaaacagagatttatgagtaacgcgcaaatttgacggcagtgatttttcatccacagcaaagccgtggttttgtgcagtaatcatgacaacattacattcaagatctttcaccggatggttaccaccatgatggccgaatttcattttcatagtttcagcgccactggctaatgccaacaattggtgtccaaggcagataccaaagatcggaatctctgtctcaagcagggttttgactgcatcgattgcataaccacaaggtgccggatctcccggaccattggacaagaaaataccatccggattcagtttcagtacatcttccgccgatgtctgagcaggaacaactgtcaggcggcagccacgatccaccagcattcgcaagatattacgttttgcaccaaagtcataagcaacaacatgataaggcaaatcctgctcttgcttatcttccggtaatccccccgccagcttccagctcccctgtaaccacggataaatctgtttagttgtcacctcttttgctaaatccatcccctccagccccggaaacgcttgcgctttttccagtgcaacctgagcgtcaatctgtttacctgctataatacaaccattctgtgaacccttttctcttaacaaacgcgtcagcttacgggtatcgatatctgctatcgcaacaatattatgacgtttaaggtaatcagaaagcgtttcttcgcagcggaaattactggtcaacagtggtagatcacgaatcactagcccttgggcctgtacttttagtgattctttatcgactgagttaacaccgacattaccgatatggggataagtaagagtgacaatttggcgggaataggaagggtctgtgagaatttcttgatatccggtcatcgaggtattgaaaaccacttccccaactgccgccccttccgcacctatggcacgaccgtggaattgggttccatcttccagaaccaatatagctgacttaatcaaaacaccctccaaagaataattactcgcaattagtgcatattaattcagatttgttcctcaaaatcaatgcaaaagctgctttttaggcaaaattttggcaaattgcgcgcattctaatgatgagagggagagttgtctacaaaaaatgttacttttcttatttttttgcacacttcgccagacaaaccaatgaaataagactgaaaatagcaataaagttaattgataaaacggtaatgagcatagaagatttgattttcagatgaaaagttgaaaataatcacaaaaaggagaagaaagcagaaaattaaggttataaacaagacaaaaatagaaaaaataaaccaaaaaacaatagaattaaacaaataaattaaaaatcgcataataaaacatttaattatgcgatatcaataagttaaaaaaaataaatttttaaagtaaatcgagatttagcacatctttcatatcaaaaagaccactatttttaccacttaaccatagagcagcctttaccgcgccatttgcaaacgtcatccgactggaagccttatgagttatctctactctctccccaatatcggcaaacatagcggtatgctcacccacgatatccccggcacggatagtcgcaaaaccaatacttttcggatcacgttcaccggtataaccttcacgggcatagacagcacacgctttaagatcccgccccaaagcatgagcaatagattcccccattgctaaagctgttcctgatggtgcatctactttatggcggtgatgcgcttcgataatttcaatatcactatactcgcccatcactttcgctgctttttccaataatttaagcaccagattcacaccaacactgaaattcgcggcaaatacaatcgggatatcagcagaagcctgtttaattgcctgtttacccgcctcatcaaagccagttgtaccgatcactatcgctttaccgttctggcgacaaatttcaagatgagtcaacgttccttctggacgggtaaaatcaataaggatatcaaaatcatcaacgatacttgtcaggtcatcacaaacagtcacaccgttatgaccaatacccgccaactctccggcatctgcgccaatcagagaagaaccggagcgctccaaagctgcaccaagagcaacaccatctaattgatatatggcctgaatcaactgacgtcccatacgcccaccagcgccaacaatagcaacacgaatatctgtatcagccataagccctcactatgaagttagtccctttcctgatttaacacgatgatcagtcagatgaatgccttaaataaagagcggatatactactttacttttatctggcacaacatttcagattatttaactaacctgaactctagataaaaaatggaactaaatgcctgttccaagatcaaaattttcgaccaagaaaaaaaagaacgcatgaggaacaagcatgaataaattagttgaactcttctgcggtgtcgatgatttttgccgtgtgttcattccatcctagaaacaacagggtattggggaaggaaatcgtcagcgcacatgaaggcaaaagcgctctcagtgtgggatacggtgatgttatcaaagcgtttcatcatataaaccatcaaatgatcagttaaagaatatttctcagatagagcattcacggcatcatagtgtacaggtattaatgttgaatgtgttgggtggactcatcgcttattgtctcaaagagaacaaaccgtcactgaatatttcccgctcagaaatgaatatgttagtgacggcttaaccagtattcaggttaattaaaacaacgggccggataaaaaaaccagcactttatcaataaactgacagctctactgaactgttgaatgaatgaagtaagggaagcagaagcgcgggaggaagcgtttaatcaaaagctgaagcaacctttgtcctgtatgtgactaatgaacctgtttatgggatgatacgggacgaattgaaggaggaaccaagtgaatgtagtgccgcttcgccgtcaacacgattggacagctttagagttttttgctggtatcggcctggcaagggcaggtttggaactcgctggtataaaaactctttgggctaatgactacgacattaataaaaaggctatgtacgaaggccagtggggaggcaacgagcttttgctggctgatgtgcattcgctttgtggcgatgatctaccaactgtagatgttgcatggtcctcttcaccgtgtacagatctcagccttgcaggaaaaagggctggtttacgtggtggacgtgaatcatctgctttttttgggtttactcgtctgatagcagagatgaaagagcgaaaacctaaagttatagccctggagaatgtgactggccttgcttcatctcataatcgtgaagatttgcgtgcggcagccaaggagttcaattcactaggttatgctgtagatgccattactctagatgctcgccgctttatcccgcaatcacgcccacgtttattcctaattggcgctcagtatcctattgacggcggggagcaagatacttgcttacgccctgattggcttgcctggcttcatgaagacgctgaaattcgtactttcatgatgccgctaccaaaagcgccagatttactcagcgaaggtttaacccgtgaaatagaacaaatgccgcataatgaccccagatggtggggaggcgatcgggttaaacgatttgtagactcaatggctccagtccaacgagaacggttggaagcatttatcgaattaccaaacatgactgcccgaacagcttatcgtcgtacccggaacggaattcctgtatgggaaatgcgagccgaagatgtctctggttgtttacgtaccgcgcgtggtggttcatcaaagcaagcggtagtaattatgggcggcggcagtgtgaaaatcaggtggatgactggactagaatatgcacgtctgatgggggccggttggtattctcttgataatatgcgcgattcacaagttcattatgggtttggtgatgccgttgctgtacctgttgtcggatggatcgccaagcacatgctcattccacacctggttagtattcagatgttcgatggaaaaataataaatgggtgagaaagatactcttattgagcagtatttgaatgcagctaaagcgtggtatgaaagccagcgggcacaaaatggctccataaataccaatgtcatgaacgtggggcttgtggtttcacgcatgatcgctgatggttttcccatcgatgatggccgactttacagcgagggtaggagccaggttcgtggtttgagtggcaacactatcgccaagattcttgaacagcatggcgagacccgcctatttacacgagagggtgggagaacatcgagaggaacgatccacttagcggtttcatttcgcgacgctatgaatggcatcaatcgctcttctggagctacgttgaacactaatcatctctctttgttgcttgaagatttcttcacaaactgtgttcgcattgattatttcgataaacaaagaattacggtcgatattgaaaccaccaaaccagtatcatcgatcatttctgatattctggatgcagcggctgaacgttctgataagcctaccggggttgttctccaacatctaattggtgcgaaattacaattgcgttttccagaaattaagatcggcctcgaccgagctaatgcagcagatatgcaaaccgatcgggaaggtgattttcaagttggaacgacagcatttcatgtcactacagcccctatggaaaagcttgtttctcgctgcgttgaaaacaagagagctggttaccgacctgtaatactgacgctggaaagtaaggtattggctgctcgtcaaatggctgaaaacgttggcatgtctgaccaaatctccgttcaagcagcagaaattttcattggtactaatattgaagaaattgctatctatgaaagtgatagaatacgcaagggagttgctcatttgatacgtacatataacgaacgtatctcaaatattgagatcgataaatcccttatgatcgatgagccaaagtggattgtgaaacttctttcaagagattgatggggatatctcttatttagggtaaatcaaaatttcgcataggaaggaaatctggtggcaataatacgcagattggttctgaaaaacttcaaacgatttaaaaatcttgaattagaattcgatcctgaattaaatattctggttggcggcaatgaagctggcaaaagttcggtgctccaggcaattgatatcgcgctcaacgccagtcgaagtaaggtagaatcgctcggtcttgaaacccttttcaatatggaatgtatctcggaattcctgaaaggtgagagaaaaatcgtcgaactacctgagctgctgatagaggtatacctagatgggattgaaggtcaccacgaactagatggccgtaataacagcaagagcatagatcacttaggcatcaagttggtatgcaagcctgttgataaatacacacaagaaattcagacgattttagctgagaggcacgataactttccttttgagtactatagcatccgttttctaaccttcacggacgagactatccttccatataaaaagccgctccagcacttactcatagatagttctcagatcaatagcgagtatgccactcgtgagtatacccgcaccatgtataccactcatgcgtctgttgtagagcgtaatcatcacagttttgagtaccgtaaagctaagtctgagtttaagagagtagttttcaaaacgatgaatgatgcattggacatctacaaattcgatgttcggacaagcccaaaagcgagtgtcgaaacggatattattattactgaaggcgatatcccgatcgatagtaaggggaaaggtcgccaatgctttatcaagacggaatttgccttgcgcaatcgcgaacacgtacttgatatcctccttctcgaagagccggagaatcatcttagccatgtccatatgcataagcttattgatcgcatccggggttcggtcaaaaagcagcttttcatcgctactcatagtagtttgattgcaactcggttgaacctcaagaaagtactaatattgagcgaagaaaacttgtcccaaccaacttctctcaaagatctcagtcagagcacagccaatttcttcatgaaggctcccgacaacaatgtgctggaacttgcgttgtgtaagaaggctatccttgtggagggagatgctgagtttatcctcatggatgccctctataaaaactgcactggaggtgcaagtactgataccgatggtatctatgtaatctctgtcgatggaacaagtttcaagcgttatcttgagctagccaagttgcttggcatcaaggttgcggctatccgtgacaatgacggggactacaaaagcaattgtgttactaactatgctgacctcatttcagattctgtgcagattttcgcagacgctgacgatgctcggtacactttcgaggtttgcatataccaagataatacgaccatttgtgaaggtcagttcgcagcaggtcgaaaaaagcttaccgtagaagaatatatgttaaaaaacaagacggaagctgcattcgaattgctcgaacaaaagggaaccgaacttgtcgcgccaaattacattcagcaggcaatcacatggataagagagtagtatttgccgttgccggatcgggtaagacatcccgtcttgttgccagccttgatgaggagaagcgctttcttatcgttacttatacagagtctaactacagcaatttgcgtggaaaaattataaatcgattcggttactttccagcaaatattactctctacacgtatttcaaatttttacacggtttttgctaccggccatttctacgatcggataagaataccataggtatcacattcaaacttcccttggcatacccacggtatgcattgactgacgaccggcgttacgtgtcaaccaatcgtcaggtttacgccaaccgtcttgccaaattcatcgagcaatctcatctggttggtgcgatcatagcgcgtatggagaagtattttgatgctttcttcgtggatgaggttcaggactttgctgggcatgattttaaccttctgctagccataagtgccgctgagttaaatgtctcctttgttggcgattttttccaacacacattcgacacaagccgagatggtaatgtgaacgctagtcttcacaaagattacacggtctacgaggctaaatttaaaaaggctaaattgctcgtcgataccgacagtctcaaaaagagccgcagatgtagcaaaagtgtttgcgattttattacggaaaagattggtatcgaaatcgaagcttatgatcgccgggaaagtgtcattagatacgaggataacccggaagctgtacttgctctctaccgggatccggaaacggtgaagctgttttacagggaacaccacaagtattcctgccactcccaaaattggggagcatcgaagggagtagaccactatcatgatgtatgtgtagtccttaatcccgctaatgtaagagcttggaaaaagggaagttttcgggatatcaatgcggagacacgcaataaactatatgtggcctgctcaagggcaagaggcaatctgacgtttattccggaatctttgctcaaagcttacaagcaatcttgatttgctctggtatcaactcggataattataagaaaggtcagtgataaatgttttttgccggagataaaacctccggcacgttgtagatgaatgactcaaggggctagtgtttcacgttggagaagccactaatccagttctgattcgagccaaccgacggattactttcctagctggcgctgcttagggaatgtattgtcataacgcagtgacttcgggttgatccaatcgtaaatggtcgagcgagcgatacctagtttgttgacaactgtcaggcatacgcaggatttttacggtaggtgatgacatagttggagctccttttatctggcttgctttggacgatttacttgatgggagcggtatgagtcgagagactcacgtaccgttctgcgagagactgtgggagcagttcctacggtctgctcaaccgattaatgggcaattaaaaacccttcctcagatagagcattcgcgtcaccgaagtataaaaggatttctgttgaccgtgttagatggggtgattgcatactgcctcaaatggaagaagccatcactgaaagttttctactcagaagaagatttcccagtgacggcttaaacggaattcgggttagctaatttctttaacttcaacacgtaactcttttggcacttcaaatacaatattttcttctctaccatgtaattcttggacggaatcagcaccaagagatttcaggcgttcaataacttgctgaactaaaatatccggtgccgaagcgcccgcggttacgccaaccaaagagatgccagtaatccactcttctttaatatcctcagcagaatctatcaggtaagcaggtttaccaacccgctgagctaactcagcaaggcgattagagttagatgaattcttcgaacctacaaccaagacaacatcggcgtcagacgccagatcccgtaccgcttcctggcggttagtcgtcgcatagcagatatcatctttacggggaccaacgatgtttgggaatcgtgcattaagtgcatcaatcacttctgaagtatcatcaacagataatgtggtttgagtcataaaacacaaattgtcttcatctttgactttcaagttccatacatctgccggagattcaaccagatacattccaccttccgcattgttgtactgacccattgtaccttcaacttcgggatgtccagcgtgaccaatcagaatagcttctttgcccttgcggctagctcttgctacctccatatggactttagtcactagagggcaagtcgcatcgaacaacattgtcaaattgcgagaacgcgcttcagcacgaatagcctgtgaaacaccgtgcgccgaaaaaatcagaatcgcatcatccggtacttctgaaatttcttcaataaagatagccccccgcttgcgcaggttatctacaacataacggttatgcaccacttcatgacgaacgtagatcggcgcaccatataattccagtgcgcgttctacaatactgatagcacggtcaacaccagcacaaaaaccgcgggggttagccagcaatatctgcatggttttcctccaattgtggatcaatttccaccacttcaatttcaaacgtgacgttctgatcagctaacgggtgattgaaatcaacagtcacagattcctctgttaccgctttgactatgcccggcatttcactgccattcattgccgtaaataacattatagtgccaatttcaggaatacccgttgcggcaaaatcacgcggagtaaaatattggatcagatcaggatttggtttaccaaatacattctcacccgccagagtaaaggtatgtttatctccgtcttttagcccagtgagctgctgttccaaaggtgaagaaagggttccatcacctaaacgaaataatgcaggtttgccctgagtgtaagtggagtcggcaatagagccatcttgcagttttaaaatgaagtgcagtaaaactgcactatccgcctgcacctggtttgacatattacttatcccactttgatggtcttttcatccgggcttagaaagctatcaatgataaccaatcccgccccgatacatatcgccatatcggcgatattaaaagttggaaagtgccaatcaccgacataaaaatcaataaaatcgatgacaaagccatgaaccaaccggtcaaacagattacccagtgctccaccaataatcagggcataagcgatattactcagtttcttctttgcgctggcacgatacatcatcaccatcaggacaactgaaatagcaacggcaatgaatgcaaagaaccaacgctgccaaccatctttctctgcaaggaaactgaaagccgccccaaaattctgggcataagtcagattaaaataaggtatcaatggaacggattcatacagatgaaagtgttgcaacactaactgcttactccccagatccaaaatcaataccacaacaactaaccaaagccagcgaaggccggtggagcaaatgggtttattcatcaggcaaacttacgctcttcgccgttaccggcaacattagttacacagcggccacaaagttctgcatgttccgccaccaatcccacatctttagcgtaatgccagcaacgaggacatttttcgccatccgccttgcggaaagcaattttcagactaccgatttcgctttgttgcgcatcttcaccagcctgctcataatctgcaacaacaacctgagatgttagcagaacaaaacgcaattcatctccgaggctattcagtttgtccgccaattcattatcggcgtacagcgtcaccgcggcttccagtgaactacggatatgtttgtctgcgcgtgcctgctccagcactttgttaacctcaccacgcacagccaacaaatcagcccagaaagcatcgttcattagttcgcctgccgccagaccaaacaaaccgccgtaccactcttcggtaaatacatattgagcacgtttgccaggcaactcattccaaacttcatcagcagtaaaggagaggataggtgccatccagcgaaccaatgcttccgcaatatgatacagcgcagtctgacaactgcgacgagccaaactatcgctcttagcagtgtattgacggtctttaatgatatcgagatagaacgatcccatctccacggaacagaattgcatcatacgttgaacaacagtgtggaaatcatatttatcgtaacatttggcaatgtccgcctgtgccgcttgagcacaccccacagcccaacgatccagcaccgccatctcttctggtttaacgctatgttgttcaggatcgaaaccattcaggtttgccaacaagaaacgcgccgtgttacggatacgacgatatgcatcagcagagcgtttcaagatctcatcggataccgcaatttcgccggtataatcggtagaagcaacccatagacgcagaatatctgcccctaatttatccatgacatcctgcggactgatggtattaccgatagatttagacatcttacggccctgaccatcgacagtgaaaccatgcgttaacacctgacgataaggtgctttaccttttattgccgttgagatcatcagggaagacataaaccagccacggtgctgatctgaaccttcaagatagatatccgcagcattaccctggaattcagggcgggcatcaaccaccgatgcgtgagttgatcccgaatcgaaccaaacatccaacgtatcaaaaattttgacatagttagccgcatcatcacctaacagttcggctggctccagatcccaccacgcctgaataccgtcaacttcaacacgttttgcaacttcttccatcaattcgatagtacgtggatgaagctcttccgtctctttatggacaaaaagagacatcggcgtgccccaagtgcgttgacgtgaaatacaccagtcaggacggttttcaaccattgcctcaatacgggcctgaccccaacccggtatccactgaacccctttgatctcttgcaacgattgtttacgcagaccattttgatccatgctgacaaaccactgcggcgtggcgcggaaaatgataggcgtcttgtgacgccagcagcagggataactatgctgtaatttttccaaatgcaacaatgcattgttttcactcaggatattcagcacaacatcattcgccttaaagacaaacatgccatccagagaaggataagttccgggtagataacaaccattagggccaaccggatttgcaacttccaaaccatatttctgaccgagaacaaagtcgtccgggccgtgacctggggccgtatgcacagcaccggtacccgcatccaaagtcacgtgatcacccagtactaccggtgaatcaaaacccataaatggatgtttaaagcgcaatagctccaacgcggaacccgcacaatgccctagcactgtccacgaagttatacctgcacgctgcatcacactttctaccaaatcagcagccaggatcaggcattcaccctcaatctgtactaattgatagttaaattcagcatgcaaagcgatcgcccggttagccggcaacgtccacggcgtggttgtccagataaccagagagaccggttgttctggtgcctgcacaccaaatttctcacaaacggcaactgcatcaaccgcattaaaacgcacgtcaattgatggcgaagttttgtcgtaatactcaacttctgcttcggccagtgatgaacgacaatcagtacaccaatgaacaggcttggcacctttcaacaaatgaccattagcgataatacggctcaatgcacgaataatgtcggcttctgtcttaaagtccatcgtcaaatatggccgttcccagtcacctaatatgcccaaacggataaagtctttcttctgaccttcaatttgctctttggcatatttgcggcactcggcacgaaattcagcggcggaaaatttttcccccggtttaccaataatctgctcaaccttaagctcaataggcaaaccgtggcaatcccaaccaggaatatacggcgaatcatatcccgccattcctttggatttaataataatatctttgagaatcttattgactgagtgaccaatatgaatactgccattcgcgtaaggagggccgtcatgcagaataaatgtttttttaccggcttttgctttacgaattacctgatacaactcatctttgtaccaacgttttaacatatttggttcgcgctttgctaaatctccgcgcattggaaaccctgtttctggcagattcagggtgtttttatagtcactcattcgattctcaattccaattttccgctagatacatgacacaggtagctgcttaaaaaattccttcgcagcaaccaaatcattcgcaatttgctgcttgagtgcatcaagggaagcaaaccgctgttcattacgcaattttttacgtaacaccacatcaatataacgcccatagagatccatttgggtatcaattagatgtacttcaagttgttgaccctgaccagagactgttggacgtgtaccaatattggcaacacccggtaaaggctggtctcctaaaccataaacttcaacaacataaacgccgtgtaccggaaccactaatcgttttaacggcaaatttgctgttggaaaaccaatagtgctccctagtcgcttaccatgaacgacccgaccacaaatgctgtatggatgtcccaataatgtttcggctaataccaaatcatcattttgcagtgcttgacggatagctgtactgctaatccgtaaaccatcatcacaaaaactttcactgctggtcacatcaaagccgtatgactcaccggctcgctgcaaaaaggcaaaatcaccactgcgagattgaccaaaacgaaagtcgtctcctacagcgagaaacttaacacccaatttttccaccagcaaccgtgaaacaaaggcttctggcgtatttgccgcaaaatttctatcaaatttcacacataataaataatccactccacattgggcgagatatttggctttatccctcaatctcgtcagacgcgcaggcgcatgacccttagcaaaaaactccaaaggttgtggctcaaaaatcatgaccattactggtaatcccagacgctgcccttcgtgttttaagtgtttcagtagtgcctgatgacctctgtggacaccatcaaaattaccaatcgtcaacacgcaaccgcggtgacatgtccggatattacgtataccgcgaattagctccatagctggctcaataccctggaaattgccaaattataccttgtacaaagctcaaggttaacccaccatcataagatgatttaaatcaatagccctgattcatacaacaaaaacgagcaggaatcccgaaaaatattcattttatttctatctggactattcaatgagatttttattgtgaaagactgtattcccactaagtaagctgataaaatcctgcgccatcacaacgaaacaagttgccgcggtacaacggcgcttatttgcacaaatccattgacaaaagaaggttgaacaggcatattcctcggcctttgaattgtccttgatagaatatatttgggagttggaccttggctaatatcaaatcagctaagaaacgcgccatacagtctgaaaaacgtcgtaagcataacgctagtcgtcgttctatggtgcgtacctttatcaagaaggtatatgctgctatcgctaccggcgataaagaagctgcgcagaaagcatttcatgacatgcaacctattgttgatcgtcacgcctgtaagggtctgatccacaaaaacaaagcagcacgtcataaatctaatctgacggcgcaaatcaacgcaatgcaataatttgcggttgggttactgaaaaaccggcctgcgccggtttttttgtgttaacagtgactatcaattatttttaagtacgcttcttagatagcacattaaacaacgcagaaaaatctttattacataccctttgaacagccgggtgttgaatcattcgttcagcaaaaatcacataatactcttcctgcacagcatctaaccgaccaatctcggcaatatcattatctataaaaatatcattggtatacaaagatggcgccacgaaaatcgcattatgatacataccaaacgctttcattaacgcagcatcatcaaactcacctagtacttcaacctgaagatttttattacgtatccaagtcaacaacttacgccccaacatagagcgacgccctggaaccaataagcgacgttcctccaaacactccgggaaaggtttttccgggataggttgtcggcagaagaaactcacatcacattcacccagttttaccgagaacagcccttcctgttgggaagaatccaccgggcaatcagacaatatcatatcgagtttgtgctggctgagttgttccagcaacaattcatgggttgattcaaaacaacgtagatgaatctgttcatgttccacaaccgccgttttcaatacctggctaaccagacgtttggacagtgcatcagcaacaccaacatcaaataaaagattagattcacggctgtagttaacaatatccaacatctcctggctcagcataaacatcttatccgcatagcggaaaataagctgccctagctctgatggcactaatcccctgccctgacgtttgaacagtttccctcccagacgctcctccagcgcttttatctgtcctgtgatcgtttgaggtgttagataaagcgcttctgccgccccaaccacagatccttccttgcaaacatgccagaaataatagagatgattaaaattcagatgtgacacccgcatacttttttccttatgtatcgccttcgtctggtagacaacgccagccatacattactaatccaccgtctcccggtgattttctgtttttccactacataaagcatccgcgatacaattctagttgttgtaccgcaaatacaaaaatgatgagtcagtccagaaattttctctaaaatgtagaacttcatttggctaaattaatgaatttatcaccactctgccatcactttttctttggtaagaccattcgtaacaagccataccccataaacgcagcgatggttgaacccatcagaatgccaagacgggaatagacactgaaagattcatccaccccttcaaaagccaatcctgaaataaagatagacatagtaaagccaattccacaaagaacagaaaccgcaaatatctgtttaagattaatctgctgtggcaatttagcaaatccgatctgaatagaaatatagctaaaaagaaaaatgcccaatggtttaccaagaaacagagccacagcaatacctaacggcaatatatcggtcaaaccatttaacgtaacgccattcagggctacacctgcattggcaaatgcaaataatggcaaaataagatacgccacccaaggatgcaaaccgtgctcaagtaattcagatggtgaatgaccattctggccacgcagaggaatcagaaaaccaacaatgacgccggcgagtgttgcatgaacacccgatttcaagatgcaaacccaaaggatagcgccaacagccaaataagccgatgttttttcgacaccgcgccaattcatccaaaccagcaaagcaatcattgccgctgacaatccaagcgccacaagagaaaccgttttggtataaaacagagcgataatcacgataacgcccagatcatcaataatcgcaagtgccaacaagaaaaccttgagttctgttggtactcgcttagacaatagcgccatcacacccaaggcaaaagcaatatcggttgccgcaggaatagcccaaccctgacgggtaaactcatcattgccattaaagagtagatatattagtgccggagcgaccataccacctatcgccgctatcaccggaaatagtgccttatcacgccctgccaaagagccttccaacagttcccgttttacttccaaaccaacaatcaaaaagaagaccgccatcaagccgtcattaatccacaacaacaaaggcttattgatctccagtgcagcgaattgtactgccaccgaaatattaagaaattgctgataaataccctgtaatggcgagtttgccattatcaacgcaataatggcagtgatgataagaagaagccctccagccgcttctaatttcaggaattgacgaataattgctgtcacgatgattaacctctgaaactgatcggacttaaatggtactctagctatggtttcgaaaaaaatcgattttatgaccagaataattcgctataaccgatctattgatgatctacatctcaataaaatagattatcaatcagaggaaatcgttaagtggagcgtgcctatttatcttacattagcaccaatttcccgcatcttagccaaaatgcggtttaaatcatcttatgatagtgttaactgtgttgctatatatacctgttatctttcaagttgcctctttgttggctgcgctcactcaccccggtcacatagttacctatgctcccggggattcgctcccttgccgtcgcgatgcatcttgaaatccatagggtatagaatagaatgtgcagagaaataacacgtggtattttcccacccgtgtattttctccattgattgttaccggaaactcccgctaaatcggccatttgttctcccgtgaaacctaattcttctttgagtttaatgagatcttctgtagtaggaggagaataattgccgatcagtcgcataagtattccagaacaaagccccttacggggccaattaattaaatgaatttgagcaatagagttgtgatagtcgctactgcaccaataagagtagaagcaacaacaatcggataccatatcgcttcacgatttatctttgtcgtttctgccattaattttgctatttcagcgtggattttttcgaattcagcagtagtcattttagtagtgctcgtcgttcttcctttttagggatgtcaggctgcggccattccgctaccttatattattacacaataaaaagtagcccttttagggttaattgcaatgtagatcgtttaatttttcacctcaaatattagtattcaatatgacttaatattatgaaaaatatattttttcagaatttatatagctagataatttctaagaattcgacagaaaagataaaataagacaataataacgagaaaacagcatgaataattaacaggtattaaaactggtcatatcgcaatctttaaataaaaaaagcattaagaatattatcaacatacactaattacttggaaaacaaatcaacatcgattaataaccaacaaatcatctttacatccaataactcttcttcttttagtcggcattattgagtgatattcctcactattagtgacgataattggcgatataatctgaattttattctcttgaagaaattccagatcaaaattaactaatacctcaccggcaaccactctctgcccttctataatttgtaaattaaatcctgcaccttgcaaacctaccgtttcaataccaatatgaattaataactctactccttgatcggaaattaaaccaatagcatgtccagtcggagtaatcattgaaaccttgccattaaaaggcgatttaaccacaccttcggtaggaataatagcaataccatcaccaataattttttcagaaaaagtatcatcaggtactcttgagagagattctgttgtgccggtcatcggagaacgtaatatgattttcttcttttttgaaaagcgtggctttattaatactatagaatcaacattagattctaatttcattaataaagtggatataaatgccactaagaaactactaaaaatgccaagcaaaataaaaataaagttattgctatctttttgtatataaaaaggtaatgacaccaagcccggtacactaaaagcaaatattttcacagagaaaatacctataatagcgccaccaacggctccactcattaatgcagcataaaaaggttttcttaatttaagcgtaacgccatacattgcaggttcagttacacctaaaaaagcagagaatgaagatgaataagctaatgatttcatttgcctatctttaattttaattgcgacggctaatgtcgcaccagcttgtgcaatattactcgcaaaactgataggtaataacataaaatcgtatccaagagacttaaagttagcaaaaacacttggcaaaaaggcataatgcatcccagtaataactaaaataggtatcaatccacctaacaataatcccgcaaacggtccagccacggaaaataatattaaaagccacttttcaagatacaaaccaattgtatttcccaacggtgcagcaataatcaataaaataggtgcggaaattaataagaccaataatggtgtaagtattattttcaataccgttggaataaacctatctacccatcgatgaatataactgagcaaccaaacccctaaaataattggaatggcagtataactataatgattagcgggaatagtaataccaaatacactaaaatatccgccaccagaactgctcacaagatgagataatgttggataaattaaaatacacgctaatgtggctgcaataaattcatttgttttaaattttcttgctgctgaaaaagccaaaagaacaggcaaaaaatagagaggtgtatcagaaagaatatataataacttatactcattactctgctctgaaacccaatccatcatatagaaaaaaattaacccgcctttaagtaaacccgcccctacaattgccggcaatacgggaacaaatatgcctgaaatgacgtcaagaatatgactaatgaaacccttttttagaccataatgatttccttcattttcttttaactgcttaattatttcactaaatatttcaacaactctattaccaataattatttgtaattgcccgctgtgaaaatgtgccccaataaccccctgcatttttctgatcgcaacaatatctactttactatcatctataatattaaaacgcaatctggtaacacaatgccaacttttatttatattttcttgtccgccagtaaatataatgatctcttttgcaaaatcttcatctctcattttatcctccacctctaatctattacctgaaaaaagcctaaatcacatataccctatggatttcaagatgcatcgcgacggcaagtgagcgaatccccgggagcatagataactatgtgaccggggtgagtgagtgcagccaacaaagagacaacttgaaagataacgggtataaatatactcacctaataccattagcaattgacacttattttgacgctccacttacttataattccctgctcttataactatcattaaccacccgttctatatgaatgactaaataaatcaattcatcatcgggcactttccattgatatttctccctcagatatttaattagcttaactgcacagttgtagcttttgaaatacttttcttctatcaactcttgcagagaaaaatccatctcaatcgcagaagaatgctcatttttattttgtctaatcaggaaatagcgcaaatgggtaataaaacgagagtaatttaccgaggttgtatcaaggttaacatgaaaatagtagtgaatgagcttaaccgttttattaatcaaattcgttaattttaatgtatctcccatcgtttgcccttcatattgagcattgacaaaatgcaaggcaatcaatgaggcttctatcggcggtaatggtttttcaatctggccattaatatagataagtgcctgtttaccgacttcatattccaacgggtaaagatgagggatctcccattgtaagacattaccaatctgatatcctttactcacacgctcaaatgcaaagtttaaatgctctgacaaagtaatgagtaatgaatcgttgagagatttgccaagaagatctttccctaatgcgataattttctcggttagctctataactgagactggaatagtcgcaataatttgattaattctatcgttcttttcaacagtgaaaactttcgcaacatcttgaacattcagcctatcgcctttttttctattaaaacctatgcccttatccattagaataacttcattattattctcatcaatggcaagaacaacattattatttatgagttttactatcgttaacaaaagagataccttacaggataaactattatatccgtcatctttcaagttgcctctttgttggctgcactcgctcaccccggtcacatagttatctatgctcccggggattcactcccttgccgtcgcgatgcatcttgaaatctttagggtatatatgctccaacctaagcctataaaataggtgaaatatatttgtgacctggttgtgcctgatcttatcagtaacactcctgtacactatattcattatgttatctttcaggctaaggcattatttttacaaagtcaacggcacagcaacatacccaacttacccaaggtatttatgataagtatcacatttttaccaaaattatatttaatgacttgcaagtatcacaaggaataactagcttttaaccaactgatataggcttgttaccgacttagttgcgactggcgtcgggcaaaacctaatccatcacgtcacgatccccttattccagggcgattatagatgatgggttaggtttttttttgccttaaattcggtctttcgctgttttcagcgtattaaatgaaggggaagtctaatgagatacgaaagtctggcaaagaaaatagtcagcgcaataggtgggaaagagaatatatctagcctggtccattgcgctactcgtttacgatttaaacttaaagatagcagtctggccaatagcgaattactcaaacagactaagggaattattaccgtagtagagagtggtgggcaatatcaggtcgtcatcggtagtcacgtaggggatgtttacgacgatattaatagatacttacaagataatacagaaaaaaccgaagttaaacaaagtgtaacgtcaccgcaagggataaaacaagataatgcaaaaggtttaaaacgtattcttgatgtcaccattgatatcatttccagtatttttaccccgctattaggtgtattggtcgccgccggattaattaaaggtattctcgctttatccgacgtgttcaattggatgagcatagacagcgggacctataaaattttatacgctaccggcgatgccatgctctatttcatgcctattttattaggatataccgcaggtaaacggttcggaggcaacccttttattactatggtgatcggagccgccttaacctatcccaccatgaccgaggcatttaaactttcgcaaacgactcctgctgttcacctcaatttccttggcattcctatctctttcattaattatagctcaaccgttattcccattatcttatcagcatggtttagctgcttgctggaaaagaagtttaatagctggtttcattcctccgtcaaactgtttgccacacctttcctgtgcctgttaattaccgttcctttaacttttctagttattggccctgtagcaacagagcttagtaatggcctggctgccggatatctcttcttctatcaattaaacccggtcattgccggactcctgatgggcgcattgtggcaagtttgtgttattttcggtctgcattggggacttatcccaataatgatcaataacatgatgacccagaaaaaagatatgctctccccactgctccagccagcaatatttggtcaagcaggtgcaactctgggggtatttttacgtacacgtgataagaatatgaaaacattatcaggtactgcactgatatcaagtctctttggcatcactgaacctgctatttacggtgtgacattaccactaaaacgcccatttattatcggttgtattggtggggcgcttggcggagcaattgtcggcttctattcaggaacagcatataacgttggcggcatgggtatctttgcgttcacctcatttatttctcccaccggcatagatagtgctttctggagtgtcatattaggttcgttaggttcatttatcttttcttgtatcgcaacctatttattcggtttaccatcagaagtaaaagtttcaccaataacatccggtacaaaaaattaatttaaactctgagaggaagaatcatattaagaggatatcttccaagtttaacgagcaattaacaagaggaaaatcatgaaaaaacaatttccaaataacttcctttggggaggagcgctggcggcaaatcaggttgaaggagcccatcaaatagatggaaaagggttatcaacctcagatatgcaaccccacggcgtcattggtcacagcatagaacgcaatttaggtgattttcatattaaggatattggtatcgatttttatcatcgttatcctgaggatattgcgctatttgctgaaatgggatttaaatgcctgagaacctccatcgcctggacacgtatattccctgagggagatgaagaaataccgaacgaaaacggcctggctttttatgatcgcctgtttgacgaaatgataaaatataatattcaaccactcattacgctttctcattttgaaatgccttatggcttagtaaaaaaatatggtggttggggaaatcggaaaacaattgcattttttgaccattatgccagaactgtttttgaacgttaccagcataaagtaaaatattggctgacattcaatgaaattaatatgtctttattctcctgttttacaggtgcaggattaccagaaaacagtaaaattcaagatatttatcaggcactacattatcaattagttgccagtgccaacgcagttaaagcctgccatgaaattattcctgatgcaaaaataggtaatatggtggcagcggccccttattacccattaacttgtcatcccgatgatatattagaatcattgaaaaagaatcgtgaatggctattcttctttgatgtacaagctcgtggatattatccatcttatatgccccgtctatttaaagaaaaaaatatcacacttgatatcacagatgaagataaaatagcactcaaagaaacggttgatttcctctctttcagttactacatgagtagctgcgcaacaacaaaccttgagattatcaagacctcggggaatatcattaatccggtgaaaaatccttatctgtccagctcagaatggggatggcaaatcgatcctaaaggcattcgctatcttctcaatatgctatatgaccgttaccaaaaacccctgtttattgtagaaaacggtttgggcgccagagatgttattcaaaacgatggctctattattgatgattatcgtattaaatatcttaacgatcatttatttcagatacgggaagccattgaagatggagttcagttattaggatatacctcatgggggccaatagatttggtcagcgcttctaccgcagaaatgtcaaaacggtatgggtttatttatgttgatcgtgatgaccaaggcaatggaacattagaacggcggcgtaaaaaaagttttaattggtataaagcggtgatcagcagtcacggtaatacccttcaagccccggaggtagaaaatgaaaataaccaataaatttcttttactcacgattccacttattttgctttataacaatgtcactgtagcagcggaaaataactgccactcgtatgatacccttttaccaagaggaccagaaacaccttcggtttcatctgcatgcgatacggtatttcctgaatggggcggccttagaaaagagatggcagatcgtggcttttatgcaaattttcaactacttactaatctaacctacgatatatcaagaagctggaaaaatacgcctagtcccaattatatgggacagcacttaactaccggtaatatcgccgcgacagaactcacttatgatttatcacggattggtttcactgataaagcacaactgcgtttaggtttaacctatgcttataataacttcaaaaataatggtcaagatggacatccttttgtctcagccttttccattaatcaacccttattgaatgatcgagtcatattaaattatggctatacgacactactctcccatttttatggcttatttttgggtagcagtacagcatcatcagcgctagggccaaccagtgtgatgttgtcccaagctggactaaccattagcaaaccaagcccatcaatagatattcggtttttatcggaaaataaacgttggtatgaccacattggcgttgccagaagtcaaagctcagaaggtttaaaaaccgattcaaaatataatacctatggtctgcgctggaaacttcccagtgcaggaaccttagtcatcaacgaattaggttatcgtgttaatgccaatgaaacggaaaatatgatctggcttcggggtggatcggtgttcaataaaaccccttattttaactataacaattcagagtatgaaaattacacttactctcattatatcgccgctacccaccaaataaccaagccggatacgtcaatgcctttccgtggctggtatattgacggtaaagccaactatgcgccaaaggatcgtaacctgtttaatgccgacatttcattatcactgttcagcattggtccatttgattcgcgtccaaacgatatggttacttttggtctggcctataataagttcagcgacgatgcaaaaaattattttgctcgcaatggtcaacttgctgaaagttatagtgcaaccgcttctgtagcgtatagctatcgtgtttacaacggcatctattggactaatagcttatcgtatactcatcacccatcagtgacaccaaaagaggatgatgcctataatttgctcacacaaattacgtttagtttataattcttaaccaaaacaaaaagtcctcatccaaaacgaggactttttacccataattcgagctttatttaacaatccagctctattatgtgaagatatttacttggtcaaatcatcaaaaaatttctttacgccatcgaagaaacttttagaacgtgggctattcgtttcttcgccggccccaccgaaagattcacccaattcgcgcagtaattctttctgtctttcatttaatttaaccggcgtttctaccactacccggcacaataaatcaccctgaacaccaccgcggacagatttaacacctttgcctttcatgcggaacattttacctgtctgggtttccgcaggtattttcagtttcacacggccatcgagagttggaacttcgatttctccacccagtgccgccattgcaaagttaaccggcacttcacaatagagattactttcttgacgctcaaaaatatggtgtgatttcacctgtacctgaacatacaaatcacctgcgggtgcgcctttagcccccgcttcaccctcaccactcaaacgaacacggtcaccggtatccacacccgccgggattttgacagacagggttttgtatctttcaactcgcccatgaccatgacatttatggcaagaatctttgataatctgaccacggccatgacagtgtgggcaaggttgctgaacggtgaaaaatccctgacgcatatgaacctgaccagcaccttgacaggttgaacaggttacagggctggttcctgctttagcgccgctaccatgacagatatcacaagtttccagtgtcgggatacggatctctttggtcacaccacgaaccgcttcttccagcgtcaactccatgctgtaacgcaaatcagcaccgcggcttggacgctgttgacgacgaccaccaccgaaaatatcaccgaaaacgtcaccaaagatatcgctaaaatcagctccgccgccgcccatgccgccttgttcaaaagcagcatgaccatattgatcataagcagcccgtttctggtcatccgtcagaatttcataagcttctttaacttctttgaattggctttctgcctctttatcgccctgattacgatcaggatgatatttcatcgccagccgcttataggcttttttaatctctttttcgctcgctgttttggaaacccccaaaacctcgtaataatctcttttcgccatctcttattttacccttaacatgcgcgcacgggcgcagagttccctcaacgcccgtgccggttaatcagcaacagttatcatcatctaactgtcaccgcgcccgctaagggctattattttttatctttaacttcttcgaattcagcgtctacaacatcgtcatctttcttcgcactgtcaccagcatctgcggttgcaccagcctgagcctgctgctgagcaatttccaacagcttagcggaagcctgaaccaaagcctgaattttcgcttcgatatccgctttatcttcgcctttagcaactttttccaactcagctacagcgctttcaatcgcggttttatcttctgctggcagcttgtcacccgcttcttccacttgcttacgcgtgccgtgaaccagttgatctgcctggttacgaacttgtaccaactcttcaaacttacgatcagattccgcgttcgcttctgcatcacgaaccatccgttgaatttcttcctcattcagaccggaagaagccttgatagtgatctgctgttcgcggccactatttttgtctttagcggacacatgcagaataccgtcagcatcgatgtcaaaagtcacgtcaatctgaggcataccacgaggtgctgcctgaataccatccaaattgaactggcccaaagatttgttatcaccggcacgtttacgctcaccctgcaacacatggatagttaccgcagactgattgtcttccgccgtagagaacacctggctgtgtttggttgggatcgtggtgtttttcacaatgagggaagtcataacgccacccattgtttcgatacccagagacagtggtgtaacatccagcaacaagacatctttcacatcaccggccagaacaccgccctgtaccgcagcacccattgctaccgcttcgtcagggttcacatctttacgtggctctttaccgaagaagtcagcaaccactttctgtaccattggcatacgggtctgaccgcccaccagaatgacatcgttcacatcagaaactgacaggccggcatcttgcaatgcgactcgtacaggctccatagaacgtttaaccagatcttctaccagtgattccagtttcgcacgggtcactttgatgttcatgtgcttaggaccagttgcatctgcggtgatatatggcaggttaacatcggtctgttgtgcagaagagagctcaatttttgctttttccgcggcttctttcagacgttgcattgccagtgggtcattacgcagatcaatgccctgatctttcttaaattcgtcaaccagatagttgatcatacggctgtcgaagtcttcaccgcccaagtgagtatcaccgttggttgccagcacttcataggttttttcgccgtcaacttcatcaatttcgataatagaaatatcgaaagtaccaccaccaaggtcataaaccgcgatagtacggttacctacttctctgtccaagccataagccagtgcagcagcggttggctcgttgataatacgttttacttccagacctgcgatacggccagcatctttggttgcttgacgctgagcatcgttaaaataggcaggtacggtgattaccgcttcagtcactggctcacccagataatcttctgccgttttcttcatcttcttcaaaacttcagcagaaacctgaggaggagccatcttctggtctttcacttccagccatgcgtcgccattatctgccgcaataattttgtatggcatgatagcgacatcgcgttgcgcttcttcgtcttggaaacgacggccgatcagacgcttaatagcaaacaatgtattttgcgggttagtaacagcctgacgtttagccggttgaccaaccagagtctctccatcctgggtataagcaatgatggaaggcgttgtgcgatcaccttcgctgttttccagcacacgagctgtcgtgccatccataatagctacacaagagttggtagttcccaggtcgataccaataattttacccatctaaacgcctccaaagaaattcgtaatcaatcaagttgctaaccaatatgaggataactctctgcttttcaatggcacctatttttatgcctctacgcgattcctcacccttgcttatatacactgactgtattagggcagcgattagcaactgcggttgattataagatggggtcgttaaaactatcatcaaggggggatgcgaaaaaaaacctttttattatttcaaaggtcattgtttccttgctgacagatcattatgattcgccccctttgctatttataccctatggatttcaagatgcatcgcgacggcaagggagcgaatccccgggagcatagaaaactatgtgaccggggtgagtgagtgcagccaacaaagaggcaacttgaaagatgacgggtatatgactttctttcagaggacttatgaacgcgaatcaattggctaaccccggccccttaggtttaatgggcttcggcatgacaaccattcttctgaatctgcataacgcaggtttctttccactagcatccgttatcctgagtatgggcattttctacggcggcctggctcaagtattggcagggctttttgaatataagaaaggcaatacctttgccgcaacggctttcacctcttatgggttgttttggctcagtctggttgggttattatttctgcccaaaatgggactggcagaagccaccagcagccaatatttagcggtatatcttggcctgtggggggtgtttactctgtttatgttctttggcaccttcaaggctaaccgcgtactacagtttatctttggtggcctgacactgttgttcgctctgttagcgattggcaactttactggcaataccactcttctgacgattgccggctatgaagggataatttgtggtgccagcgcattttatctggcaatggcggaagtgctgaatgagcagtatggccgcactattctgcccattggcgagataaaaccgtaataaaccgtgggttggaagaaggtaaaaatttttcccctcttccagtccgttatgagtgtattgctatcctatttttttcaatgtgtataagcattatggatttcgaattgatagcaagtacggtgcttatagcgttggttaggacgaagtatacagctctcttgctcccattcaggatggttgggagaatccggcaaaaattgtggctcaaatgccattcccgcatagttctcatatcgcccaccatcacggttaggcgttccacctagccaatttcccgagtaaaactgcacagccggttttgtggtgaatattttcattgtgattgcttcatcaggggaggtgactgagattgcataatccgtgtccaaacgggttgcttgcaaccagaatgaatgatcatatccatttacaatttgctgctgtttatccagcataaagtgactgttaattgctttaggtgttcgaaaatcaaaacccgtattatcaaccaaagccagttggcccaatggaataccattttcatcaatcggtaaatagccgtcacttttcacttctagatgatgcgataaacatgttttcccagcatccgcccccaataaattaaaataagcgtgattagtcaaattaatgggcgtcgcagcatctgtatgggctaaataatccacgattacgtgattatcattggttaatacgtaacgaacggtcacaacgacattaccaggaaaaccttgatcaccatccggtgactgtaatgtaaaactcactgaataagcatctcttgcagtgattgtccaacgccgcttatcaaaaccctcaatcccaccgtgcaaacaatttcctgcctgatttacctgtaattgataagttttaccatcaagattaaaacatccatttgcaatccgattggcgtatcgtcctacggtagcacctaagtaactggtctgtttataaaaatcttttaaggtggcaatacccagtaaaacctctcttttctctccacttaagggcacacggcaacttaaccaagatgcaccaatgtccatcaacacaatagaaaaacccgaggcattggaaaggcagacaagatttgctttttttccatccctagcaatatcttgtgtcattgaagcgttcaataattcaaagtaagcatctatcattttattgcctaccatgtttcaaccaaatctgcaccttccgaagcctgacatacataaatagtctctttcagacctgtcaacgcaaaatagtgttgctctaccgctgccttaaccacatcaaccaaagtttgtggcactaaagccaccacacaaccaccaaacccaccgccggtcattctcactcctccttgtttaccaatggcttgctgcacaatatcaaccaaggtatcgatttcaggcacggtaatttcaaaatcatcgcgcattgactgatgtgattgcgccataagttccgcgattaatggcatatcactctctgccaacgcttttgctgccagaagtgtacgttcattttctgtgattacatgacgtgcacgtctagccactatgctatcaagctcaacattacgtttttcaaattcatctaatgccacatctcgcaaagccttaaccccaaataatgccgctgcttgttcgcattgagcccgacggatattatattcactgccaaccaattcccgttttttatttgaattaataatcatgactgcaatatctttcggcatagatacagcttgcgcggttaaatgacgacaatcaattaataatgcatgctctttcttaccttgcgcggaaattaattgatccataatgccacaatgacaaccgacaaattcattttcagcttgctgcccatttaaggcaatttctgtttggctaatgactaggtggtaaaggtttttaattgtttgaccaataactgtttccagtgccgccgatgaacttaatcccgccccttgtggcacattacccgctaccacaatatctgccccgttaaatatatagccacgactgagcagacactttacaacaccgcgaatataattggcccacattttactttcgtgaaatgtaataggttggctaatatcaaattcatctaattgattgccgtagtcaaccgaaacaacgcggataatattaccctctcgtttcgccgccgcaaccacaatttggtaattaatagcacagggcaatacaaagccatcattgtaatccgtatgctctccaatcaaattaacccgacccggcgcttgaataatatgtgtcggcatataatgaaatactaaatcaaaaacattttcaacgcgattaattaaagtcttcatcacattactctcaaatatagtatcagccactcgataatgaacattgttgctctttataatgtatatcgctcacagcacgcaaaagctgagcggcttgctctgccgttaaatcacgttgtttttcagcaaacatttcataacccaccataaattttcgcacagtagccgatcgcaataatggcggatagaaaagtgcatgtagttgccaatgttcaatatcagcgccttgttcaaaaaacggtgcaaaatgccaacccatcgaatagggaaaagcgctatgaaataaattatcataacggctggtaagctttttaagcgcgaccgccaaatcatcgcgttgctgatccgttaattcattcattcgacgcacatgaactttaggtaacaacatggtttcatagggccatgctgcccaataaggcacaaccgccaaccaatgggttgtatcgaccacaacccgctcaccatcagctaattcagcctgaatataatccatcaataaattagaactctgttcttggtaataagcacgcagttgtttatctttacgttcaatttcgtttggcagaaaactattcgcccagatttgcccatgtggatgaggctgagaacatcccattgcttcacccttattttcaaaaacttgaacccaaagatattccttacccagtatttcaatgtgctcattccaggtatcaatcaattgacgaatgtgtttaaccggcaattccggcaatgtcttactgtgatcgggagaaaaacagatcacgcgacttaatcctctaaccccctgcgctttaaatagtggatgacatgatggtggtaaatcaggtgaatcgagcattaaagccgaaaaatcattattaaaaacaaaggctccttgataagcaggatttttatcaccggaaatacgtgtatttgatgggcaaagaaaacattgctcatcatagttcggaatattgtctatcaatggctgctcatcctgcccatgccacggccgtttcacccgatgaggagagaccaaaacccattgcccggttaacggattataacgacgatggggatgttcaataggattgaatgcaatttggggcatggcagtctcttaccttaatctatacttttcaacaccggctgtggaaatctttattaacactcaggctggacacagtttaacaaccggcattaacactaatctgagataccaatcacgcaaatatcaacgattacacaaaaaatttaaatatataccctaaagatttcaagatggatcgcgacggcaagggaacgaatccccgggagcataggtaactatgtgaccggggtgagtgagtgcagccaacaaagaggcaacttgaaagatgacgggtatagaaacgaaaaagcctctcatctgcgaggattgacacgtcaataacagttaatttacatagatataatagatagataaaaaatatctaattcgcccctgtatcaagcagctaatacaggggatactatgtgtttatattgtattatcaatatcaatatttttctcaattatcccaacttcaacttttggtcctaaacgttgtttcattgagttataaataccagaatctttatcgtgacttttaaaagttaagacaaatgatacctcttgttcagagagttcatggtgtgatgacatatcaaactgatataaatcacgggtaaaaattcgagcatagagtcttaacttcgtattatcaacggacactcctgaaaaagattttccatgatgtcttatcggactccatttagctaactcttggcgagactgaagttctttttctttagattccttcatagtaccaagaagattttttactttaccgtcgttactaatgctctgcaaagaacactgtagtctagtagcaaaataattttcgccgcccagttcagaaaccaagggttttaatattgctgttaatattatttctcctttaatttttccatcttccaacatttcagtaggtagaggaatatcattccaataatatgcaaaccctgcacgaattttactattccaagcgagagtcactgtcccttcatcacaataccaaggaaggttattaccttctttccaaggtgatccccaacctagacgcaaatcatgtgcacacctctcagctttatttattaacaacgctctaactaaatcaggagtaggttcttttagacttttaaacgcatgtgctgctattgatgaaataagaggtgtactataactagttccagtatctattaccccaccaatcattcgtaacgttgaaaaccaagatagttccggctttttcatccctgccggagcaggccctcgcaagctcatcgagcaaggtgtagttgccatgccattttcatccgcacatcgtcccgctatagttaaagcagattcacagtcggcaggaggacacaatcttatattatttgatctgcttacattaccgattgaaataattggtaatatgttaaattcacgggaaattcgattaacttcatgccctaaataactaatttcctcattcgaataatatggctcactctcattaaatgaaagattccatacctgagataccccttttgtctcattagcaacatctctaagatagttaataaattgttcggtcgttggttgaatagagactccttttttattaattgcttgaacgctaataaacttgcactccaactcaggtaaagcgagattattattccacgcagatccttggcaaattactgaagtaaccttattaccatgccttaaatctgcatcatgttgatctactaatggagtaatactcattacgttaaaaggtaaataagaaacagcagagcaaccgccatcaacaattactactgttgggatatttttcaagttagataaattaacccgaattctgcttaatccgtcattgaaaaatcgtcttctgagtagaaaactttcagtgatggcttcttcaatttaaggcagtaagcaatcaatccacctaaaacgcacaacagaaagccttttatacttcggtggcgggaatgctctatttgagaaagagtttttaattgcccattaatcgtttcaatgataaaacgcttttttaacattatcttatcccactcagcttgcatactcgctttcatgttacgccgttttttcgtgatgaaagtgacatcggttttagctaaatcgtccgccaattcctggctgaggtaacctttgtcaccgtaaagagaacccgttaattcttttgataattcacgaacaggttcccgatcatccacattacccggagtcactttaagcgcgagaatttcaccctgatgattgacaaccaggtgtaatttgaaaccgtaaaaccagcccattgaattttttccgcgctttgctatccccgcaaagaccttatgtcgagggatgcgaatgttatggcagacactcaaacgggtggaatcaataaaagcaatgcctgtgggtttcccttttaattgagtcagatagctgcataatggcaccaaaacggaaggagccacactgacaaaacgaggatagctaagcaaggttggaaaatccttatggtgatatttccaaatatgttctagataaaaatgtttaaaatcacggtaatgcgacatatgaaaaaggatcaaaatggtcatgatttcactgggatacatatgaccttgtcggcggcgtaaacgatgcccgctatcgagacaaaattgttcccattgagggatgaaaaaacggcaaaaatcatcgacatcacagaaaatttcaactaagttgtccatagcctgttcccccctcggagctgtttttggtgcacaccaaaactttgctcctggaacaggcttctcgtcaatttcttatccagaattcgggttaaattaggtattggttctttaccgctacctggtggcactgattttgctgaaacatgatgtaccggctcaattctataaacaataccagagctaattaacttattaaaattctctaaattatttattactgtggtaaatgataatattccgtcgattaaatattcatccaattttcttggaaaatatctatttccatttttttgtatttcttcatttttaaaaacattatcaaatttagaatgaccaaaaccaataatcttctgattagcaaactcttcaagttctttcttaacagatactcttgcttttttatcatggaatggtaaaacccaaacgttgaactgtttttctacatcatcgaacgcttcaaaaacagctttttcctttcttcctcgtaatacttggtttttatcaaaaccaataatgctttcaagacgagaaatatcgactttaattcgaccatttttcgctctttctattttctcaatcaaactagagattctagaacctgaaatttcgactaggtatccatcaaaagccggagcaactattcttgttaaatcatctggttcaaataaatcatcaggagtccaagatggtgcaagagaatcatcaaacattttagctaatagatgaattttacctgaatgggaaacaataccatcatcttcgctaatacatctaagctctttcgatagcttctctttttgagtatctaatcgcgcccaaattatacctttagaatttttcccaccaccactcactgtattgggaactggcttatctaaaaaagatagtacaggatttaataaaggacttctaacaccctcagccataattcctattccttgagatagcttgaaattgtctgtctacttagtttcaaaaaactacctatttcagcctgagtaaacaatttagtttcagaaagcaaattaacgatgctttttttattatccgaacttaacccttctctgtaaggtataatcgagttatgtgagtcaccctcaattattgcttgaatgaccgctacaatatcaatattcgaattagtcaaaattgcctgtcttctcgctgctattgctatagtttcaatatctgctccacttaatccgtctgatattatagatagtgcttttaactcctttgatatacccttgtcttggaaaaggaaatgattccaaagagactccctaacttcaaggtttggcataccaaagcgaattttatatggaaaacgtcgccaaatcgcggggtctaaaagatctgcgtggttagttgccgcaatgactactgcgctatcatccagtgaatctaaaccttgtatcaaagtattcacaacacgtttaagctcacctatttcgtaccgatcatcacgtatcttagcaaccgcatcaacctcatctaataacaatatgccgtttctagaaggtacataatcaaaaatttgccttaaattcttagctgtatcacccaataatgatgatattactgaatctaatctgacaacgaataacggcctatttagttgagaagcaatatgaccagcaatcaatgtcttaccggtacccggtggacccgataatagtaatcccaatcttcctgataacccattttcaattagctttttttgatgtttaacactttcaataaaagcattaaaagtaatattttcagactcgcccaaaaaaataggggtcactgaccactggtgttcctcaattaaaggcattcttgatttagggtcaacaggtaaactatcactatatcccgaactacgaagtggaactcccttacgtcttactatggatttaatttttttggcaacatccatatcatcagcactgatggatttagctattctattactgacacttctaacttctgtataattagcatccaaagacgcttctatgagggcaacaatgtcctcagcaacgatattcataaccaaccccttaaatacaatgacaatcaaaaatgattttttgtcatgccaatatgcatgaatgtcatgaataatgtcgattttgtcaacctaaaaaacaaattatcaccacactagcttttacgctgtatacgtcaaatttaactttcgaggagttaccatcaataagatataaggcgcaagttcgcccgcccgtaggggatttttaacatatgacgttcagtgaaaaactataaggccactttaatctgagaggtatcaagccctgtacaacattatcagtgtctcgtgatatcgggcagagttatctgtatgccgaaatagattgttgctgtatgtgccgctggtagcttgaaaaaccgtaaagcaaatccatttccaaaggctcacttcaaaaagaccggcttttcttgctaaagagcgagggattgtgatttattttaatttcaccttttcaagcgccgcgaaaatttgctgtttatccgaatcctttaaattgtgttgttgaatattcttcataaacatttctttgtcagaagcgcttattttttctccggctttgagcaaggttgcaatttgttggaggatttccgtactcaacccgctaattttaatccgaacatcatctagcggcttcagttgccaaccattttcaggaactgacaaccaatcagctcgatagcgatattgaatcgcctttgccgcattcatttggattataacgaatggtctaactgattccccatttaacccgaaagattcagcctcacttattgatttagcaagaaccttctcttcttgagccaaaacttcaacaggtaaatgattttcagacttgtatcctgccacatctttcatgtaagagagacgctgattaatcaactgagctaccgtggtctttgactccattgctaacgccaccgttggtgccattgcgctcataaccaatgccaaaccagcaataaaaccaatctttactttttttagccgttccatttttcaccccgaaatttattccaaacaaactaatcaacataccaaattaattataagcttaaaatgttgaaattacctttcgataggtggcagataaaagttcgattttttgattctttctacaatcaactcattattcaacgacgagcacttttcggtctaaaagccgcgactaccttatcatcggtttccacatacgggccatctagcaattggatacaatacggcacactggcaaaaatgccggataccagaactttgccattttcgtctttcaagccttccaacgtttctgcgattgcttttggttgccccggcaaattcaaaatcagcgcctgcttgcggataacaccaacctgacgggataaaattgccgttggaacaaattgcaaactaatctgacgcatctgttcgccataacccggcatttcacggtctgcaaccgctaatgtagcatcaggcgtcacatctcggcgtgcggggccggttccaccagtggtcaaaaccagatgacagccgatttcatccactagctcacacaaggtttgttcaatgatgatctgctcatccgggatcagacgagcctctatctgaaaaggggtggtaatcgcacttttcagccactcttctaatgccggaatccctttgtcctgataaacaccgcttgatgcacgatcagagacggataccaagccaatgcgcaattcattcatataaacctcaattaactaaatagcaaaaaggcggccaattatgccgcctttaacgctaaaagaatagtttatcgcctatcattacagcagatcagagatcatcttctcaagtttgccctgatcaatagcaaatttacggataccatccgccagtttttctgttgccattgcatcctgatgatgttcccaatagaactgagcttcattcaatggctctggacgcgctttaatttcaccggcataacccagtttacgttcaacttcaccctgagcttcagacaactctttcaacagcgcaggcgcaatagtcaaacggtcgcaacccgccaattccaagatctcaccggaattacggaaacttgctcccataaccacggtgtcatagccatgttgtttatagtattggtagatttcagttacagaaataacgcccggatcttcgtgtggagcgaactctttctgatcgctgttcgctttataccagtcaaggatacggccaacaaatggcgaaatcagataaaccccggcttccgcacaagcacgcgcctgagcaaaggaaaacagtagtgtcaggttacagttaatcccttctttttctagctgttcagccgcacggataccctgccaagttgaagccaatttgatcagaatccgatcattgctgataccagcctcgttatatagcttaatcaagcgcttagctttggcaacactgcgttcggagtcataagacaaacgggcatcaacttctgtcgaaatacggcctgggatcagtttgagaatttccaagccaatatttaccgccagtttatcactagcatccacaatctgctgctcgcgggaatcgctctgttcgcgcgcccacgcaattgcttcatcaattagtttacggtattcaggaatctgtgcagcgttaaggatcagagatgggttagttgtcgcatcttgtggctgataaagcttcatcgccgcaatatccccggtatctgctactactgttgtcagtttacgcagggaggttagtttatcggtcattttgtcatatctcatcgttatgcgtgaaattgtggcattgttattgagccatccactgataataacacggtaagaccttgctgcaaggcggtaaaacgatcacgcgcagtcactcactctgtagccaatcttttcatatcacttctctaatgttcaatattgaaccaatagtttccatgtgtgagacaacgattattttcttatttttatcaattctatttattaatttcctgcaatcaaactcatcaaatataatcacatctgaatccgagttgttaagataatataaaaatctatcgtttgctaaatagggatcaaaattatgatctatatattattgatagaacataagcctgatttttagtcataaaaaacagacttagatcattaatcacactcaagataggtttcaacattacaataaggaatttttataataaaaataaaaaaagaagataataagttaattataacttcaacaggaaacagaattaaggtactatattgcttcgttaaattattcttaattgcagaaatgttcattttccaccttattttcttaatataccctatggatttcaagttgcatcgcgacggcaagggaacgaatccccgggagcatagataactatgtgaccggggtgagtgagtgcagccaacaaagaggcagcttgaaagatgacgggtatagctaaattaggtcctctttactccctacataaattacttcaatgtgagtttattctcaacatcagcgcttattttctttgcaacaaaaactgaactcaaagaacacattgcaaaaaagacaaacaacacactacttcctagcaaagggattaaccatattattataataccaaagactgattgataactccttgcaattgcatccgaagacgatattattctcgcaaagtatttttctggtgtcagctcttgccctgatgtatagagagatatccttaaaaaagaaagtccgataaaaataagcatagttcccaaagtataaaataacaaaacaattcttgacaaaggcatagcccaaagaatactcccaattgcaatcaatagagagccaagaaagaaagatttttttaatttacttatattaaaatagtagctagaaaaataagatccaaataatattgaaacagaagctaaaaaggaaaaataagcaattaaatcagaaaaagaaaatgaatataatccattaaataaagagataattgttgtatagctagaagtcattatataggttgaaatcacttgatatgacaccatagcagttaaaatacttatcctgaacaataatatatttctctgagtatcattattgatgatatattctaatcctccatatttcataacagcatcatttttctttattttatttccccattcaccaataaaaaagagaaatataattgataaaataaaacacattgattcaataataaataaaaaacgtatcgatgttatatttatcaaaaaacctgctatcaatggagaagatatagagagcaacccataatagaattgttgctttgatataaaagccactctttcttctgagctgacaaatgcctggtatgccactgaccttatcgatatattcaaacctgaaaaaaatgatagaagaaaagatatgaaaaataataaatatatattattgacaaatacagcaagaaatattgttactgcccggaagaaatccgaagaaatacaaatagcccgcatactaaaccgagcagttagcccgccaataaccacaaaaactaatatactcgctgttaaccttacagataccattaaagacgtatctatctccgacttggtaattgaatatacaagcgaaagaagcgctatttcacttattcctgtaccaaagatagatattatatcagaggataatagcctatttttattctccataccttatctcacttatattttatttatccaatcgatttcattaatggtatttccccgacttcaatcaaataagaaactggtaatattgtacactttctcacttttagcataattactatattacaatccaagaaaaatcgatcaaactcacaaaaattaatattttaataagccaaaaaactttattttaatttatatataccctatggatttcaagatgcatcgcgacggcaagggagcgaatccccgggagcatagataactatgtgaccggggtgagtgagtgcagccaacaaagaggcagcttgaaagatgacgggtataaattatttaaatatttttaacgctaagtgcagtatcgatcaataaaatggagtgcaaaattatcagcttgttaccctacagatatcacgcacacagtttccgctatcgtcgtgattaattctttattatcctatcttctgttaaagtatcctcatctgaacaaccgggacgatattatgcttattactatttcacctgcaaaaactcttgattatgaaagcccgcttgccacggaggaatatagccaaccagaattactcgaccaatcaaagcggttaatccgtatttgtcgcgaactgacgcctgcccaaattgcgagtttgatgggtatcagcgataaacttgccggcttgaatgccgcccgttttggcgaatggcatgctgatttcacacctttaaatgcccgtcaggctatcctggcatttaaaggtgatgtttataccggtatgcaggctgaatctttctccaataaggattttgattttgctcagaatcatctgcgtatcttatctggcctttatggtgtactccgtccgttagatctgatgcaaccttaccggttggaaatggggatcaaactggaaaataaacgcggtaaagatctctacgctttttggggagacctgatcacagaaaaactcaatgaggcgctggaacaacaaggtgataatgtgttggttaatttggcttccgatgaatatttcaaatccgtgaatacgaaaaagttagccggtaaaattattaaaccggtatttctcgatgagaaaaacggtaaatataagattattagcttctacgcgaaaaaagcccgtgggctaatgagccagtttattattcagaatcagttaacgcaaattgaccgtctggtggagtttaatttggatggctacgcctttgatgaatcgttatccaaaggaaatgagctggtatttaagcgccctgaacaacattaagaccttactaccaattaataaacgccgcatgatctgtgcggcgcccactttcataatgacttgggtgctctttccatcaagaaagctcgcaacttagcaaaatctgccggtaagtaatgggatagcaactccagatcagcccgttcagccaaagctttgggcaagggtaattcctcacccagaatctgctccacactctctttaaatttcgctggatgcgccgtaccaagaaataatccgtattcaccttcttgtaattgatcacgcaagacacgataagccaccgcggcatgaggttcagagatataaccgtgtttagccagttccttaatcgtttctttagtcacgtcatcattgactacaccatatcccaattcgctcaatggccaggatttacggtggaacagttcttcaatacgtggccagttgtttggctggctcacatccattgcgttggaaagcgtggcaacggtctgatgaggcaaccattttccatcctctagataacgaggaactgtatcgttaacattcgtggcagcgataaagcgttttaccggcaatcccatcgattttgccaataaacccgcggttaaatcaccaaaattcccactcggtacagaaataaccagttgttcacgctgatcttccggtagctgagcaaccgcttcaaagtaatagcaaatttgtgccaacaagcggctgatgttaattgagttagctgaattgagatacagagcctgtttcaactcctgatcatcaaacgcctgtttaaccaacgcctggcaatcatcgaaatcgccatcaatcgccaccgtgtgaatattaccacccaatgtacagaacaatttctcctgtaacgggctgattttgccctgtggatagaggatcaccacctgtacattatttagcccataaaaggcgtgcgctactgctgctcctgtatcgccggaagtcgcagtcaggatagttactggctgttcaccagcaacttgtgccaatatttgcgccataaaacggccaccaaaatccttaaatgccagagtcgggccgtggaataattccaatgttgcaacatcattttccacgttggtaacaggtgccggaaaagtaaaagcgttcttaattcgtgttgccagttgttctggcggaatttcatcgccaataaacgcggagagaatgcaaccgctgcgggtgacaaaatccagtttcaataggtggtcaatttcttcacgactgaattcgggtaaatcttgcggaaagaaaagcccttgctgtttgcctaatccctgtttgactgcttgtgcaaaactcacctgctcgctgttgtctttcaagttatacagtttcattagttaccctatttgtcgtgcgcctgcgagatccagacggcaaatgtgtacaaaaccttcatcattctgaacataatgctgttgcagccactcagctatttcctctgcggtcgctatatcattacaaatggaaaacaatgtcgggccagaaccagaaataccacacgccaatgcccctacccgttttgctgtttcacgcgcattggcaaaacccggtaacagttgggtacgatacggttcagcaaccacatctttcatcaatctggcggccagcgccggttgccgtgtatgacaggcatgaataaacccggcaagaaaacgtccatgatcgataacatcctgcttcgaatattttacaggtaaaattgctctggcttctgcggtagaaactttgatgcccggataggccatcacccataaccactcatcaaacgaaggtactggctgacagataatatctccttgttccataatcagttgcaaaccgccgagatagcatggagcgacattatcatagtgaatactgccggaaatacgtccttccagttcccccatcattgccagtaattggctttcattaaatgggagacctgcaaactcgttcagtgccatcaaacctgcaacaacagaacaagcgctggagccaaggccagaaccaattggcatatttttttccagcgtcatttccactggtaattgtttgcccaaatgctggcagaataattgccagcattgataaacaatgttgtgctccagcttctcaggtaacttccccacaaactgcccttcattacgcaaactgaaactcttcgctgcccgaacagtaacgcagtcacctaataaagcaccattaactggagagaccgccgctcccagtacatcaaacccaacactgacattaccaatagatgcaggcgcatagactttaatcacaattaaactccctgtttccaggacaaagtacgcagcatatcggcgaaaacacctgcggcagtgacatcattacctgctccgtatccccgcagtaccagcggtatcggctgatagtaacgcgtgtagaatgccaatgcattttcgccatttttgactttataaagcggatcattgctgtctactgccgcgattttcactctacaacagccatcttcaatcacgccaatatagcgcaacactttctcttgttctttcgcttctgccacacgctggctgaaaacctgatcaagagcgggtaaacgttcaaggaaagcatccacatcccctcggttatcaaaggaagctggcagtacaggctccacatcaatatcatccaattcaagttcataacctgattctcgggcgaggatcaacagcttacgagcaacatccacaccagatagatcatcacgcggatcgggttcggtataacccttctcttttgccagtaacgtcgcctgagatagtgacattccttcatccagcataccgaaaataaaggagagagaaccggaaagaatgccattgaactgaaccaattcatcacccgcatttagcaagttttgtaagttctcaataacaggcagaccagcgcctacgttagtgtcatacagaaatttacgtttagatttctctgccgccttacggatctgatgataataagccatcgacgaagtattggcttttttattcggcgtaaccacattgaaaccatctctcaggaaactagcgtattgatcagcaatttgctgattagaggtacaatccactatcaccgggttcagcaaatggtactctttctccaaacggatcaggcggctcaaactaaaaggttctttggcctctgataaacactgcggccaattatcaaggcaaatacctctcatgtccgtcaacatggcccgtgaattagcaataccacatacccgtaaatcaatgtgcttttgcttcaaccatgtttgttgacgacggatctgctcaatcaaaacactgcctacgccaccaacgccgacaacaaaaacttcgatcacttgatcggtattaaataacatctgatggcacaaacgaacggctgttgttgccacttcattatcgataaccgcagagatagaacgttcagaagatccctgtgcgatggcaacaatattgatattaccgcgcgccaatgcagagaagaaacgggcagagatgccacgcagggtacgcataccatcgccaacaaccgagataatggaaagattttccatcacatccaaaggatcaagcaccccctctttcagctcaagatagaattcttcactcagcgcctgacgcgcgcgttccaattcacgttgagggacacagaagctgatactgtattctgaagatgactgagtaatcagcacaacagagatccctttgcgggacatgacagcaaatacccttgccgccatccccaccatccctttcatacctggacctgatacgttaatcattgccatattgctcaggttggttatcccttttaccggcgtactttcatctttttgcccatcgccgatcagtgttcccggcgcatctggattggcggtatttttaatcaagcaagggatctgaaattgagcaattggcgcaatggtccgtggatgcaataccttggcaccaaaataagagagctccatcgcttcctgataggacatgccttttaataaccgtgcatccggcacaactctgggatcacaagtataaacaccatccacatcagtccagatttcacaacatgtcgcccgcaagcaagccgccaaaaccgcagcagaatagtcagaaccattacgccccaagacaacgagctcccctttatcatttccagccgtaaatccagccatcaggacaatatggtcatctggaatattcagagaagcaatgcgcttagtagactcgttgatatctaccgtagattcaaggtaatgaccttgtgccaacaaattttctaccggatcaatcaccgtgaccttgtgaccacgtgcctgcaatacagactccatgatagcgatagagagtttttccccacgacaaatcagggaagcgttaatgctgtccgggcattggcccagtaacgaaataccatgcagaacctgtttcaattgagcaaattcttgctcaaccatcatttttaaccgttcataagcaaaaccgggttgcgcccgtgccatcccctgtaataaatcaacaaagatctgctcagcatcgtgcatatgggtaatgatctcttgcccggcgaccgttttttcaatcatagccactaaatgattggtaatttttgccggagcagaaagcaccaacgcgaccccgccttgagaaaattttttctctgcaatgtcggcaacgctcaacacccgctggtaattagcgaccgaagttcctccaaatttaagtactcgcattaacatttttctcctgattccgcgccaaaaaaaagcccgcatctgatttggatgcgggcttttttctctgttttatatatgcgtcagcccgccccgcaacctgtggtcccggtggtggtaatcattgtggttttcaggctgataattcgcataggttcctgtctgttatttaatgggttcgaccctatattggttaaatgaatttgtgcgcaaagtcaaacattttctctaaataaccttacgcttttgatatttttaacattggaataattcatttcatggtcatcaagacaaacaaatatttcttactgaacccaatcttttagttgttaaatccatttttaacaaaattaacaatatattttatcttttcgtaaaaatcagttatttttgttcaccgcccagctcatgggggattatttttcgtacaaaaccactctatgcgttaacaaaaatttgtcatttgcatgacagaatacaaggtataaaataaccaatataaataatattaacgtgctacaatcaattttgatgtacgtcaataaaaggtagtttttttagatggtaaatgcattgcaagctgttatattgctgttaatggactaacataacactgtttaaccagttttttgggtatatacccaccaaaggaaaagcaacttttactttcagtgtaaaacatatcaataaaatgttattactgatttgggctataatttcagtgatgacaaataataaccagtaaatatcctgagataagagtagtttgaatcattctgatttatttttaagcgattctaggtagcaaccatgcaaaccccgcacattttgattgttgaagacgaaattgtcactcgcaataccctaaaaagcattttcgaagctgaagggtacatagtttatgaagccactgatggttcagaaatgcaccatattctgtcaaacaacgacattaacctggtgattatggatattaaccttccaggcaaaaatggcttgttacttgcccgcgaactgcgagagcaagcaaatgttgctttgatgttcctgactggccgtgataacgaagtagacaaaatccttggcttggaaatcggtgcagatgattacatcaccaaaccatttaatccgcgtgaattgactattcgcgcccgcaacctgctttctcgtaccatgaatctgagtaatgtcagcgaggaacgtcgccaagttgagagttataaattcaacggttgggaattagatatcaatagccgttctctgataagcccggctggtgagccgtataaattgccacgcagcgagttccgcgccatgcttcatttctgtgaaaatccaggcaaaatccaaacacgcgcagatttactgaaaaagatgacaggtcgtgaattgaaacctcacgaccgtactgttgatgtaacgattcgtcgtatccgtaaacattttgaatcgacgccagatacgatggaaattatcgccaccattcacggtgaaggctatcgtttctgtggtgatttggaagcataacctgaactatcggtctctaacaatgacaggatgggatatccctgtaggaacccatcctgcccctcaattttccaccggcttccacggcataatgggtacagcactgatcgcattcttcggtgaaccatcgatcatcttatcggaatatgtcaaatagactaatgcattacggtttgcatcatagaagcgaacgacttgaagttttttaaacaccaatgaggttcgcttctggaaaactacctgaccttttttgctgctctttttaatcttgtctgttagttcaatctctccaacctgctgacaagaaatagccgcatcagaagtatcttccgcaagtcctaaacccccttttattccgcctgtttttgccctactcaggtagcaagtcacatttttaacatcaggatcatcaaacgcttccacgacaattttgtgatcaggcccgataaatttaaaaacagtgtctaccgagccaatctcttcagccagagccgccacaggtaaacacaacaatgtcgttgttacgagtatctttatgatttttaacatatatagtctcatgccttaattaattcagcgtaaaatttcaccgccgagataccaaataggcggtaataccacccaatagcaataattacttattagaataatttcacaaagtaatgagtgaaataataatacgaacaagtatcctattgtaaatataagacttgttttacacttagtgcttatatctagtagagttattgttgaatgccacgcttgtcaatacattatgaacaccaacagcacgcagacaccagaacagatatgcaatacataggaatgattcgttttactcactctgtaagcctgttcaagtggcaaacaaaatagcctagtagtatgagttcttatattgttctttctggtcttaacgactaaggagatgtatggatcaaaccggcatcattcgtgatttattacgttggctagataatcatttagatcaaccgttatcactcaataatgttgcagctaaagcaggttattctaaatggcacctgcaacgtatgtttaaagacattaccggccaggctattggctcctatatccgtgccagaaggttatcacgggcagccgttgctttacgtttaaccagccgccctattctggatattgctttacagtaccagtttgactcccaacaaactttcactcgcgcatttaaaaaacaatttaataaaacacctgcactttatcgtctcagtgaggagtggtgcgccacgggtatttgcccccccatattgctggataagaggtatattcccgaagcaacctatctcacactaaaggaacaatcactggtgggtatagaacaaacctgctcttatacgctggaacaatggtccagtttttgtactgaaatgcgccacaatttctggacatactatctgaaaaatgcggaagtgttacctcctgtactttatggccttcatcatgcgactcccaatccagaaaaagaagatgaacaaaccgtattgtacacaacagcggtagaaccccaatatgcccagtttgatgtggcaggcagccaacctgttacattaccggctggagaatacgtttcatttagttactacggtaccaaagatggcttacaagatttcctgtttaccgtctatggcatttgcctgccaatgctaaacctgacacgtaggaaaggatacgacatcgagcgatattatcttaccaataccaatgatagagacaaggaagcggcgaatcatatcatcgaatttcagtatctcattcctatccaacattaacgttgtaattcatccagtgcgggcgtatccagatgtgtgatatcgcctgccgtttctacaatccagcccgacgctagccacggactgtgctgataatccactctggacagagagcaatttcgcaagcgaagacgacgttcagcatgtgcgggcaatcccagtattgtgccaaccaaacatcccaaagcgatgccatgactgactaacagcggtcggctaccaacaggcagattacgacagttctccagcgcagccctcatacgcacagccagttcatccatagattcgcctttggggatacgtcccccaggtgtgccatcaaggactttcttacgccatttctcttcttccgatgttaatgaatcaatatttctgcgttcaagaacccccatgtgcaattcacgcaaacgtggctccagaataatttcacaaccacaaaccttagcaatgatttccgccgttcggcgtgtccgtccaaggtcactggtaataatatgggtaatactttcagattttactctttgtgccactaatctggcttgatgttcgcctgtttcagtcaaagggctgtcagattgtccctgaatacgacgtgctgcgttccattcagactccccatgacgaacaagatatacctgtaacattttcattttccgttatactgcgtaaatactcgttcaaaggataactcatctattatgtatcacgttattgctgcaaccaccaaccctgcaaaaattaaagccattagtctcgcctttgatgatgtttttgggccaggtacttatcgaatcgaagatatcaatgtagacagtagcgtcccacaacaacctattggtaacacagaaacccgcactggtgcccgccagcgtgtcatggctgccagacaagttcgcccagaagcagacttctgggtcggtgtggaagcaggtattgaagacgatatgacatttgcctggatggttgtggaatatcagcaaattcgcggagaatctcgttcagccagtctgatgctaccagagaaaattcttgatggtatccgcgaaggtcgggaattaggccatgaaatggcttatcttacaggcattgataacatcaatcagaaagagggtgcaattggctttttcactgatggcatcctgactcgtaccagcgtgtaccaccaagctctgatattggctttagtgcccgtacatcatgaaatttataaagagctgaacgcccgttaaaccagcattccgcctaggccgcaattggcggcctgctatttcagtaattgctgttccaaccaagccttaacatcgtttgaagcaaatttcaggctattagagccgcgcgtaatcgtcgcaatacccactccaagttcatttttcagctcacgctggctcatttttccactcatcaactccttgataatgcgtaccctggtagccagtgctgtccgttcatctggtgtcaataataactgcaaaatcggatgctgtagattttcggcaaaagcctgttggagtaatgtcacaaaacattgccaatcttcatgatcttgcggcgaaagtgccgggtctgtcagatgatttgtcgtcataattaatcagtcatcatactatttaactagtacatcagcataacatagtttgctacatatcaataacgcctttgccattcagcgtcagtcaatacatttgatgacttacccatgaaataagtgtagaagacatcataaaccaaaatatttttgacataattgcgggtttcagaaaatggaatactttcaataaaagctatcgcatctaatcgcccaccactgttagataaccagcgatctacacgagtcggtccggcattataagcagcgctggccagtatccgattattaccaaagcgctgataaaccgattcgagataagcagtaccgatttcgatattcgtcagcgggtttataagttggctactgtttatatatccttggattccattttgcttaaccgtatcttgcgccgtttctggcatcacttgcatcaacccaattgccccaactggcgaattagcttgcggattccaggcactttcctgacgggctatcgccattgcataactttgagaaatccctttatttgccgtgaagtgactaaattcccgccgccatgccaatggaaaacgctcttcaaggtagtcccacatttttccggttattgtcgcctgtacactaagcgccgcccatttttgatcgaaagcataacgcgccagttgctgttgttttaatttatcttggctggcgaccaagtaactccactctatgcgagcaaggctatccatttgccaatatagcaactctcttactctctgtacttcgggtattgaagcaatagcagcatctggcttttttgcgctattcatcatcagcggatagctgacattcagtttctgcgcagcaaccattggataaaaaccacggccttctgttagctgacgcaatattgcctcaccttcacttttattaccctgcgccaatagaatgttagctcgccaataacgccattcctctttgtcttggttctctaacggtagcaattttatccattgagccacaccacgctcatctgcatgacccaacgccaaacgaacacgacgctcaagcaatgcaacagattggctatcgcggatcacatcatcacgccacttttcctgttcatcactcacatcacccattaactgccaggcaacaatatcttttaatcgctgacgttcacttgcagtcatcttttgcactctgacaattgatgggatgatcactcttgcctgctccggatcttgacgtgcgaaacgcgaaaaagccgctaaagtggctacacggctaaaatcagtcggcccggtatgatcagcaaagtctgttacggtaaccggatcattctgcaacttaatcagaccttcactgatacttttgtatccctgtggtaactgtttagcgaggtaactgactaatgatgtattgcccgcttttaacgcgagactaatacgctgtaatatcagttttactgataaatggcctgtttgctgccaaacatcaaataatttatcgcaactgtctggtaaagaacgcccattcaaccaaacttctttcgctccctgccaggcaatctgctcctcacctgtagcccatttagcaaaatagtaatgacagcgggcggtaatcgattttggtgcagtagaggtgaacgccagtagctcgcgccactcttcgcggcgtgcaagttcattgataaaacgggatgataaagaacgtgcgggaggcagattggggtgacgatcaataaaatcacgaatccgcgtcggggtggcaagtgacagatcctgagccagttcccggtattgcagataaggataaagaggatagtttttcaatgtgggcatcagtctcgcaacttcagccctatcgctgacattccacgcttgcttaatctgctgatatctctgtcgctgattttccagagaatcagcatttacggctacagagataaaaatcaaccctatagccatcgtaaggcattgccatttagccattatcacgctcctcccggagatcaaatcaaataggttaatattacgaatgcataaacagcataataatataattaccaccgcttaccacattaattcaccctatgatgaaatatctaactacatatccagaacaggtaagttttttatccaataaattgattcactttaacaaattcaacctaggatcatcttattcgggcaattgggttatatacactatggatttcaagatgcatcgcgacggcaagagagtgaatccccgggagcatagcaaactatgtgaccggggtgagcgagcgcagccaacaaagaggcaacttgaaagataacgggtatagagtttattaacttaaatcgggtaaactgtgacaaatcatattcagatgaacatcaacaacctaaacggatataatcaggtatcaacgcgccctgtccatgcgacttgcttcgcaaaacaggcattatcaccatcagagatagcgaggcttatagcaacgtggctcaatatgtctacaccatgcatcgggttggtaaaattgttcccccgaagcgccatattctgaaaaatatctccttgagtttctttccgggagcaaaaattggggttcttggtcttaatggcgccggtaagtctaccttattgcgcattatggccggcatcgataacgatatcgaaggagaagcccgaccacaaccaggaattaaaattggctatctaccgcaggagcctaaattaaaccttgaatatactgtccgcgaagcagtggaagaagccgttagtgaggtaaaacacgcgctgacccgtttggatgaagtttacgcagcctatgctgatcctgatgctgattttgacaaactggctaaagagcaaggtgagctggaagcgattattcaatcccacgatggtcataaccttgataaccagcttgaacgtgccgctgatgccctgcgtctgccgccgtgggatgcaaaaatcgagcatctctctggaggggaacgccgccgtgtggcaatctgccgcttactgctggaaaaacccgacatgctgctactggacgaacccactaaccatcttgacgccgaatctgtcgcttggctagaacgcttcctgcacaattacgaaggtaccgtggttgcaattacccacgaccgttacttccttgataacgttgctggctggattctggaacttgatcgtggtgaaggcattccgtgggaaggtaactactcttcatggctggaacagaaagatgctcgtctggctcaagaagccgcaacagaagctgcacgccgtaaatccattgagaaagagctggaatgggttcgccaaaatccgaaaggccgtcaggcaaaaggtaaagcacgtctggcccgttttgaagaattaaatagcgttgaataccagaaacgtaacgaaaccagcgagctgttcattccacctgggccacgcctgggcgacaaaattctggaagtggaaaatctaaccaaatcctatggcgaccgggttctgattgataatctgaacttctctctgcctaaaggagcgattgtcgggattatcgggcctaacggtgcaggtaaatctaccctgttccgtatgatctccaaccaggaacaacccgattccggcaccatcacattaggtgaaaccgtcaaactcgcttctgtcgatcagttccgtgacaacatggatgataagaaaaccgtttgggaagagatctccggcggccaagatatcatgcgtatcggtaattttgagctaccaagtcgtgcctatgttggccgttttaacttcaaaggtattgatcaaggtaaacgtgtcggtgaattgtctggtggtgaaagaggacgactgcatttggctaaactgctgcaagtcggcggtaacatgctgttgctcgatgaaccaaccaacgacctggacattgaaactttgcgcgcactggaaaacgccttgctggagttcccaggttgtgcaatggttatttcccatgatcgttggttccttgatcgtatcgcaacccacatcattgattatcaagatgaaggtaaagtcactttctttgaaggtaactttagtgaatacgaagactataagaagcggactctcggagcagaagcactggaaccgcatcgcattaaatataagagaatcagcaaataatcatattgaaaatggcctggcaacaggccgttttccactcaattatttagatataaactcatagtcttattcattatgttatgtgtaagatacgtatcatggataatctttcctcctttcaaagtaataatacgatcggcatgtttgataagcctattatcctgtgaagccacaacaaccgtacctctttggttatgagcaataaaacctaagatatcaatagctgtttgacagtcataattattaagatgacgggttggctcgtcagcaaacaaataccgagggcttttcacaatggcactggctattgccagccgttgtttttcattatcacgcaattccttgggatatatatctttcttgtgtttcaggccaacaatattgagtgccttagttgctctgactattgcttcctgatgagaagtcgtgattccacaagagagagataatagcaaattatccaagaccgtaagttcattagataaattaattctttgaaagataaaaccacaattcatcaaatggaatctatctaactcgaagttattcagcctccccaactcgttatcagcaattaatatttttcctccatcgagaggcaataacccagaaatcattgccagtaaagtactttttcctgaacagagatccccattaatcaaagtaaattcacctggaaaaatagaaagagtgatgtctgaaatcgttttctggttagctttactgttcgaaaaaccatatgaaatatcaatggcttcaatcgtagcgatttgattcaaattcattatctcagcataattaatagtgtaagaaatctggcattatcagtaactcttacagccagagcaatccgtaaaaatacagatattcatcattataagattacacaaacgagggaaaatcatataagaaatatctcaattgaaagtatatcaatatttctaccagtgactatttcaaatgactatctgcatgctaaaatcaaaattttactaaacaagatcaacccattcctatcaaccactcattagcaacaggccattatcttgttagtacaaataaaaaaataacatcagacaaataattttttatagataaaaacaccttaatatcataacaacatgttaaaattaatatttaattaccatcataacaatgatactttgaacattaaattattaataaaaaaccagcctcccattattccccaaccaatcaaaaacacaaaaacttttatttaaaaatcaacagggaagtatttaattattaattttgtttttattcaagaaataaataatcaatagaagtatcaaaaatattaatagccgttatatattttattacttacagaaaataaaaatatccagccacaatgcatattgtgattagatatatatttactaatttattatataaaatattatatacaaatctaattataaacgattcaactgacgtgtcatttaggattagccgctaaaagttgctgaatgagctcaatacaacgtaggaaacgctgatcataatcgggtgaatccacattgacatattcaatattattacttttcagcatatcctccagcagttgctgaaacgctttacgatcctgctcgctgccaaggctacgcaaaccgtcagcaacccaaggagtgttgttttccagtagaatgaccaaatcaaatcggtattcatcaattaatgcctgaacaaacgggtgttcacgtccttcatatcgcttacagaatgcttgggtagtgacaaaatcggtatcgataaatgtaaccttattcgcatattttacggcaaaatcaatatattgggcttgtcccaatgcaatcttgtcatagtccgaatattgtagcgccatctcatctccccccagatgagaaaaaacataatcacgaccatattcccaagcacttgtcgtattaaaaatatttgccaatttgttaactaatgtagatttaccactagattctccaccaagaatcgctacggtacgaacaaagaaaggtttcacttcggtaggaatatattcccaatgacggaatggatcttggcgaatatgccgaccactgattttcataaacgaacgttgtggatcgataagaattgtctcaattcctaaatgctctttatatcggggagaatcctgagtttcgctggaatatatataagtgggatgaatgcctttctttgacataaaggctttcatgccatcactccacacatcccaaccatgtggatagggttcaattccctgttcatcaaaagagtgaatatgaatatttttctgatacttaaatgtttgaagcaaccagcgcaagcgatcactcaccgtgggttgctgagacatggaactactcataaatagctcccgatctctaggctcatcatggcaaaggataatatgcaactcatccacctgactacaggcccgttgaatcagatagatatgcccagtatgcaatggatagaatttgccgaataccactccaacagttttattttgcacaggatattgcaacctcagatagtgatggagcgccgccagtttttgggcactaggacttttaattttgtcattaattaattggctaagataacctttggtcataccacttgcatcggcaacctgttgcaacgtataacctgtctgtttaatcgcttctttaaggtagtcaaattgccccatatctcctccctgtttaatcaaaatcatccataacagataacgcatccgccaactttttcacaccaaaaacttccatccctggcagcgcttttttcggcatattggcataagggactatcgcccgtttaaaaccatgtttagcggcttcggatatacgctcctgtccactgggcacaggacggatttcccctgccagtcccacctctccaaatacaaccaaatcacggggtaacggccgatcccgaaaactggagactaaagagagcagtaaagcgagatccgcgctggtttccgcaactttaactccccccacaacattcacaaacacatcctgatcggacatttgcaaaccaccatgacgatgaaggacagccaacaaaatagccaaccggttttgctccaaacccacagccacccgccgtggattggtcatcatagaatgatccaccagcgcttgaatctcgaccaacagaggacgagtcccttcccacaccaccatgacagaactgccagcggtaacttcatcaccacggctcaggaaaatcgctgatgggttactaacctcacgcaatccttgttctgtcatagcgaatacgccaagctcattaacggccccaaaccgatttttatgactgcgtaaagtgcgaaagcgggaatccgcttcaccatcaagcatcacagagcagtcaatacagtgttccaacaccttcggacccgccaacgagccatctttggtcacatgaccaaccataacaatggcaacaccacgagtcttagcaaaccgagtaagataagcggccgtctctctgacctgagcaacactccccggcgaagattgaatatctgccatatgcatcacttgaatggagtcaatcaccatcaactttggctgttcctgctccgcaatcagacaaatttgttcaatactggtttctgacaacatattcagattatcagccggcaatcccaaccggtgcgcacgcattgccacctgctgtaacgactcttccccagtgacatataaagttttcatctgtgcagacaactgacacatcgtctgcaacaataaggtacttttccctgctcccggattaccaccaatcagaatcgcactaccgggaacaacaccaccgccaagcacccgatcgaactctttaaacccggtagaaaaacgaggaagttcttccagactgatctctgataatttctgaaccctactgacaccagcatctcccgcataaccactgagccgctcattacgggaggaaggtgctgcggctaagcgcacctccgtaatggtattccaagcatgacacgcactacattgcccctgccagcgcggataatccgccccacactcattacagacaaatgcccgctttactgctttagccactctgcactcctaaaaactttatacccgtcatctttcaagttgcctctttgttggctgcactcgctcaccccggtcacatcgttcgctatgctcccggggattcactcccttgccgtcgcgatgcatcttgaaatccatagggtatattaacgttcttcgtgtttgagaccaccacttaacacacacaatactcccatgagatcagcatgacgaatggtcactttcgactgtgcatacactttcggcttggcatggtaagcgatacctaaccctgctttgcggatcatcttcaagtcattagcgccgtcaccaatcgcgacagtttgctccaatgggatatccagttttttcgccaatttcaccaatgtagcagccttatatttagcatcaacaacgggccctataaccttacctgtcaactgactatttttgacttctaactgattagctaccgcagccaccaaacgtaaattctggcgtaaatggtcagcaaaataggtaaaaccacccgatgcgatggccacatgccaatcaaaggattgtaacttacgcaccagactggtcagccccggcataagtggtaaattttctacaacctgtcgcagaatatcagcatcagcccctgccaactgagcaactcgctctcgcagactatcagaaaaatccaactctccttgcattgcccgctcagtaatttcggccactttgtcacctacgccagccaaacgggcaatttcatcaatacattcaatttgaattgctgttgaatccatatccatcaccagcaaacctggtgaccgcaaccgtgggatctgccccaagggaaccacatctaaccgacactcatcagctagccgtttaatacgagcagtcaaatttccggcaatacgtactacctgataatcatcaatacgccatgaagaaacgatgacaatagcagcgccaagccgatgttgaaaattactaatacgttgtttatccaggccacggccatatatcaaccaaccactgtcacccgctcggtaatccaacggcatcacttcttcaccacttaacgaaagtggtaatcccggccacttatggacctcttccggcaaatagtgataagccaggttattagacattaatccctactcctgtaatcccacatgatttgacagcaaaaaattgcgcttcaaactatcctctctgtactgcatctggcaacattgcgttgaccaaagcttggaagagataacgatgatcaaagctaaattaaaattccgactgcataaaacagctattatcttgatttgcattgctttattagtatttctaatgcagggcgtttcttatttcagccgttctcaccaacaagcccagatggatcaatttgaggaattggcaaaaaccttggcaaaacaagtcgcattcagcttatctgattatatggagagtggcagcaaagatcttaataatgagcggatactggctaatttgcatcatctgacgacaaacagccgcatacttgatgccagtgtttatcttaacaatgggacacaggttgcccatagcggagaaaacgtctcggtgcgggatcgtctatctttggatggtaaaaaagcgggcagctattttaactaccagatagtcgtccccatcccaggaaaagatgagccaaaaggctttctgcgcctgacgctggatacccacaaattggcaactgagtccaagcaggtggataacacaactaacttactccggatcatgatcttactcgctttagcaattggttttattctggcacataacctattgcaattaacaccaagtcgatggcaacaatcgccttatttactgacagccaacagtaaatcaagtgcaaatggagaagaagagaaataaagcgaaaatttcttactaaatcattttgatatcgaaatcaatataccttatggatttcaagatgcatcgcggcggcaagggagtgaatccccgggagcatagataactatgtgaccggggtgagcgagtgcagccaacaaagaggcaacttgaaagatgacgggtatatacccaatagatttcaagttgcagtgcggcggcaagagaacgcatccccaggagcatagataactatgtgactggggtaagtgaacgcagccaacaaagcagcagcttgaaagatgaagggtatagatggaattagggcatggctcggagcattcaatcatttccagggcctcagccccctttaccaagacatttcatggctgaataaacacgctgtaactaataaaaaatcatcaatcttaactgagagaaacaagctcgcccattatttaataaataaagtaatagtttattcagttactttaactttaattacataataatattcttagtgacatatatcacatatttatcaatatatagaattaaatcaaaaatacctgacattagttacataactcattaattaacaacgcatttttcactcttgctcattttcaaataaaaatatatctatttgtttttattagaaatttaaaacaagccatatttttcaattatatcactaggtaaatccacatattgattattaagtcaaattaatgactaatagcgccccaaaaattatatgacgcgtgcgggatgccaaagaataatgaaaaaaaaggttattatttttactagctttcttattgttactaccgatgttaaagccgccgaaatatcagatcagcaactcattcatcaacaagaacggcagaaagcactggaagcccaattagcgccgccaccggcggatattcgtctgtctgttcctgaaacagcagtaccttctacatttcccgtcgatacgccctgctttcccattacgcgagtcgttcttgaaggcacggaacattttcctcactggttacctttaaagcgtttagcccaacagggagaaaaccaatgtctgggcacccaggggattaatatattaatgactcggatacaaaaccggttaattaatcatggctatgtcactagccgagtattagcacccagtcagaatcttaattccaagacattaaaactcatgatcataccgggcaaaattgggcatattcgctataccgctgaaagtggcaattatattcaacgaataaccacatttcctccccgcgaaggagaactgcttgacttacgggatattgagcaaggattagaaaatttacaacgttttcctactgttcaagccgacatggaaattgtaccgaatgaacagttaggcgaaagcgatatcgtgctgaactggcgtcagtcacgacattggcgactcgctagctatctggacgattcgggttctaaaagtaccgggcgttaccaaggcggattaactttatatctggataatcctcttgcgttgagtgatctattttatatctccggtgggcgcgatattcgctctccttctggtcgcagcagcaaaaactacaccatccattactccctaccagtgggatactggatggcaggcatcactgccagtaattacgattacaaccaaaaggtagccaggccaactaaagacgacaaatacagcggcgaaagcaaaaatctgaatgtccaactcagccggatcttgcatcgtaacgccggtcaaaaaacctcggttaacggcgagatttatcgtcgaacatccaaaagcttcattaatgacctggaaatcggcgtacagcgccgggaaacagctggctggaaattaggattatctcatcgtcactacatcggtagtgccaccttggatgccggagtgacttaccagcggggaactcgctggtttggggcacaacccgcaccagaagaggtccgcggtgaagcaactgccttacttaaaacaacccagttttctgcggcactttctgcgccatttaccctattttctcagccattcatctacaaaacccagtacctgcgccaaataagcgccagaacgttgacgccacaggatcaattttcaattggcaatcgctggaccgtacgcggatttgacggcgaacgcacactaaatggagatcatggttggtacagccgtaacgaactggaatggcaaacgccactgaatggtcaatccctatatatgggcatggattatggcgaaatcggcgggccggggaatgagcaacgactgggaaaacatctggcgggcggcgttctaggttgtcgcggcagtcttaaaggcgtgagctatgacctgtttgccggtatcccactatccaaaccggatggctttcaaacctcatcagttacaaccggattcagtttgtactggcagtactaattcagaataacaacgttgccgaagcgtagtagataaaaagtgttagcggagagaaacaatgaacaagcatctgtatcgtattatctttaacaaagcacgaaacatgctgatggtcgtggccgatattgcaacttccgggcaaggtagtacggtacgccgccgcagtcgtcggcaatcaccacaatgcctttgccggttaacagcgttacgactgagtttgttattggcaaccggctgcatctccctaacagcacaagccaatattgtggccgacggacaagcaccgggtaatcagcaaccgactatcctgaacagtgcaaacggtacgccacaaatcgatattcaaacccctaacgccgcaggtatctcgcgtaatacctacagccaatttgatatcgataaacgaggcgtcatccttaacaacagtcacaatgctgtccaaactcaactgggcggtatggtggcaggcaatccttggcttgccaaagcagaagccaaaatcattctcaatgaagtgaacagtattaacgccagtaaacttaatggctggatagaagtcgccggacaaaaagccaacgttattattgccaacccggcgggcatcacttgcaacggctgcggattcattaacgcccatcgcgcaacactcaccacaggacaggccatgatggaacaaggccgactgaaaggctttgatattgaccggggagaagtccgcatagaagggctgggactggacagctcacaacaaaattacaccgaaattattgcccgctcggtggtcatcaacggcaaactgcacgcgaaagatctaaaaatcacaaccggacgtaatatcgttgatgcagctcaccagaacattgagaaaaaatctgctgacggcagcgagaatccctcatttacgctggacgtagcagctttgggtggcatgtacgccaataaaattatgctggtgggtaccgaatttggcgtaggggtacgtaacgccggccacatcggagcaaccgccggtgaagtccgtctcacggttgatggactgattgagaacagtggcacaattgccgcacgaagcaataccataatcaaagcggagtcgatacaaagcgccagcggcagcaccctatccgccggtattgataataaaggaaaagccacactgcccggatcgctgacactgaccgccaaacagcacattcaggccaatggaaaaaatctggcaaccaatactctggaagcacagagtaaaaagattgatctcagcggcagccaaacttctgctaacaacattcagctcactgccagtcagcaagagattagtaccgccaacgctacagtcaccgcggaccgctttacagctaaagcaccaggccaatttaacaacgacggcggcacactggtagcacgagaaatcaacttaacgactccagacttatccaacaatcagggaaaaattaatcaaaccggcaacggcgagctggtactgaacacccaaacactgaataaccaaagcgggacccttctcaatgaagggaaacgactggctatcaccacaagaaatctggacaaccgtcatggaaaaatcgccaataacgggaatgacctgaacctaaccgtccacgagaaagcggacaacacagaaggagggacaattcaactcgccggtaaaggtaaactgtcactcaacacccatcagtggataggtgacggaggcgaactgctctccaatggtgaactggatatacaagcccacaacctgcaactgaacaaaaaagcagtcactaccgccgacaagattacaataaaaacagacacattaagccatcagagtggagtaatgcagcagaatggcaaagataagatgtccctcactgccaagacactgaataaccaaaatggcgagattaaaggtaatggcaacctgaaaatcaatgccaccaccttggataacagcaaaggcaaaatcgttgcaaccggtggcagcacagaactgatcattgagaaaaacattgaaaacgttgacggacgaatcgaaaccaaaacagagctcaccacaaaaagtcaggcgttgaataaccatcaaggatcattactggctcagcgaatagatagccaaaccaaaggacataaattcaccaacaccgcaggacaagttattgctcaagaaaaactcaccctaaacagcggtgaactggataacacgtctggtctgttacaatccgacagtgacatgatagtcaatactcatggacagaaattgactaatactaaagacactaaaaatggtgacgaaaaagagatcaaaaaaggcaccatattaagcaaaggtaatctggaactccgtacaggagatatcaacaacaccgctggtattatttccgctaaaggaaaaaccacccttaacgccggtaacgttgacaataccgacggccaactcttatcacaacagatggcggaactgaccacacaagcattagataacactcgtggacagatccaatcagagtcaagcctgttgttggatacccaaaaccaagccctgaccaataccgacagtggcaaaactggcggtatcattgccaaagactcattacgcatttccagcggtaacctgactaataatgcgggcgttatccttggtcatggcattcacatcgatacccatgaacaacggctaagcaaccaaaaaggcaccatagcgagcaagaaaaatctgcaacttgacagtggagagctcgacagtaccagtggacaaataaaatctgatggcgacatgacattagacacccacgggaaaaagctcaccaccgctaaaagtagtgacacgggtggcgtgaccagtaagggagcgctcaccttaaaaacaggcgagatagacaaccacgatggcaccatcacgggtacaggaacgacaacgataacgggtggagaactccacaaccaacgaggaaaacttgtcagcaaaaccggtcccctgacattaacggtaaacaacactgacaacagcggtggactactgcaatccgcgggtgatctgacactggatacgaaaagtgggctgctaaccaacaccaacagcggcaaagaccggggcatcatcagcataggcaacatgaagctgacgacccaaggcgttaacaacgatgcgggcctaatccatgcgggtaaaaatctgatccttgacgggcagaagggaaccataaccaatagcaacagccagcctaatcaaggtattcgtagctcaggagacttgacgctgacggcaagtgctattgataaccatcaaggatctgtagaagctgataaacaactcaccgtaacatccgggatagttgacaacaccggtggtctactgaaatccggcacaaccctgtcgctcaacacccaaggccagaaactgactaacgcacagagcggagaaaaacgcggtatccgcagcggcagtgatctgaagctggaagccggtgaaattgataacaccgctggcctgatagatgcgcaaggtgaaacctcgctaactagccaaaacctcaataacaccagcggtaaaatcctctcgcggaaaaaagccgatctgacaacacaaacggtcaacaaccaaagcggactgatacaatccgcaaccagtttgaaattagatacacaacagcacgaactgactagcaccgacggcgggatcatcgcagaagaggctttagaactggctaccggtaaactgatcaacgaccgcggatctatccgtggtgatcaaatcctcattaacacccatcagcaagcgctaaacaatgtggctggcaccatattcagtaagaaaaatctaaaacttgatagcggagaacttaacagtaccggcgggagaatagagtctaccggcgatatgacgctgaccactggcgatattgacaaccaagacggtgtgattatcggtacaggaacaaccaccgttaccggcggtgagctgaaaaaccaaggcggaaccctcgccagtgaaaccggctcactcacattgaccgtgaaaaaaaccgataacagcagcggcctgttgaaatccgcgggtgatctgacactcgatacacaaggtgagctactgactaacctcaacagtggcaagaccggaggcataatcagtgcaggcaatgtcaagctgactgctcaaggcatcaataatgacgcgggctggatccatgcggataaaaacctgactctagatgggcaacaaggcaaaataaccaaccgcaacagccagcctaaacaggggatctcaagccagggagagttgacaataaccgcgggcgctatcgataaccaacagggaagaatcatcgccgataagcagctcaacgtgacatcaacaggagccgttgataataccagcggtaaaatggtcagccagcatcaacaactcaccatgaataccggtgaattgaataacaccagtggtttgctgcaatccaaaacaaccctttatcttaacacccacggccaaaagctgactaatacacaaagcggggatgacctcggcatacgcagcgacagtgacctgactctggaagccggtgaaattgataacaccgctggcaagatagattcacaaggcaaaaccacgctaactagccaaaacctcaacaacactgacggtaaaatcctctcgaaaggaaaagccgatctgacaacacaagccgtcaacaaccaacgtgggctgatacaatcctcagccagtctgaaattagatacacaacagcatgaactcaccaacaccgatagcggtaaaaacgggatcgtcgcagaagatgccttggaactgactaccggtaaactgatcaatgaccgcggcgatattcgtggtaacgaaacccacattaacactcatcagcaagcactaaacaacttggctggcaccatattcagtaagaaaaacctacagctcgacagtggagaacttaatagtaccggaggacgaatagagtctaccggcgatatgatactggacacgcacgggaaaaaactgaccaccgccaaaagcgacaaaaccagtggcgttattagcaatggaacactgacgctgaccactggtgaaattgacaaccaagatggttttatcaaaggtacaggaacaaccaccgttactggtggtgatctgaaaaaccaaggcggaacccttgccagtgaaaccggctcgctcacattgaccgtgaaaaaaaccgataacagcggcggcctgttgaaatccgcgggtgatttgactcttgatacacaaggtgaactactgactaacctcaacagcggcaaaaccgggggcataatcggtacaggcaatgtcaaactgactactcaaggcatcaataacgaagctggctggatccatgcggataaaaacctgactctagatgggaaacaaggcaaaataaccaaccgcaacagccaacctgaacaggggataacaagccagggagagttgacaataactgcgggcgctatcgataaccaacagggaagagtcatcgccgataagcagctcaacgtgacatcaacaggagccgttgataataccagcggtaaaatagtcagccagcatcaacaactcaccatgaataccggtgaactgaataacaccagtggtttgctgcaatccaaaacaaccctttatcttaacacccacggccaaaagctgactaatacgcaaagcggggatgacctcggcatacgcagcgacagtgacctgacactggaagccggtgaaattgataacaccgctggcaagatagattcacaaggcgaaaccaaattaactagccaaaacctcaacaacaccgacggtaaaatcctctcgaaaggaaaagcagatctgaccacacaagcaatcaacaaccaacgtggactgatacaatcctcagccagtctgaaactggatacccaacagcagaaactgacgaataccgatagcggaaaacttaacggaatactcgcactggatagcctaaaactgattacaggtgaactcatcaatgatttcggatatatccgtggcgatgaaacgcacatcaattctcatcaacagacattaagcaacctaactggcactatagtcagtaagaaaaatctaaaactcgatagcggcgagttagacagtaccggtggactaataaagtctgacggcaacatgacgatagatactcacggaaaaaaactgaccaccgccaaaagcggcgataccagaggcgttatcagtgaaggaacgatgaccctgactgccgacgaaatcgacaatcaagatggttttatcaaaggtacaggaacaacgatcgttaccggcggtgaactgaaaaaccaaggtggaaccctcatcagcgaaaaaggttctctaacattatcagtgaaccaaactgacaacagcggcggcctgttgcaatccgcaggtaaacttactctcgatacacacggtcattcactgactaataaaaacagtggtgatcggggcggtatccgcagccaggacgatatgttaattaccagcggtgatttacataatcaggctggtacaattaccaatcgcaaaatcgcaaccgtaaataatctccaaaacaccattgttggtacccaacagataaagctgattacccaagcatttaataaccaacaaggcaaggtccattctgatggcaacctgaacctcaacacgcaaggccaacgcctgaataacacgggtgacaaagacaaatcaggcgaattctctgctcagggcgatttaacactggatatcggagaattaaacaacgacgctagctttatcgccgcggatggcaaaactaagattaccagtacaaccctcaccaataaaaaaggactgattgctggtaacagtggactggagattcatagccaaacgcttaccaacagcaatggctcattgaagtcagcaaacaccgtcaatattgacacaaacgggcagctactggacaaccagcatggccgtattattggcgatgacaacaccaccgtgaccagtggcaaactgaataaccaacacggacatattcagggtaaaaaactcaccatcaacaccggacaagccgatacggataaccaagacggtaaactgttgtcagcagacaccatgaacttgaataccctacagctcgacaaccgtcgcggacaggtcaaagccataggtgacgcgacgattaacgcgccgaaacaaacgaacaataccggcggccttatccacagtgaccaacaactgacactaaaaacagcagaactcattaaccgggagactaatcatcctgaccagggtaccgaagcccaagacctgataattgaagctcaacagatagataacacccagggaacattacagggagccaaccgcctgcaagctatcattaaccagtcgctgaaaaacgaacaaggactaatctccggtggaaaacaactcaccatcgaagataaaacccagaaactgacggtgaataaccagcaaggcacactgacgggaagtgaaaaggtcaaaattaaagccaacgccttgagcggtgacggtcaaatcttatcgcagggcgatatagaggtgaaattaaagcaagacttccacaacaccggtaacatcgccgccgatggcaagctgtctttggaaaccgacggcaacattatcaatgacagcacaatgaaagccgaacaggcgtacctggaagcccaaaatctcaccaacacccaaactgcggaaatcagagccaagcaaaccgaagtcaacgtccgaaacacgctgaccaacaccgggttaattgacggcgaactgacccatctcaccgccaacaaagtactggacaacaccggaaccggacgtatttacggtgaccaaatagccctcaagagtggcactctcaataacacagcaaaagatggcaaagccgccgtcattgccgctagagatcgactagatatcggcaccggaaccctcaacaaccgtaaccatgcccagatttacagcgtgggtgacatgcgcattggtggacaactggatgaaaacctggctgcgacgagtcaagctggccgactcagcaaccacgcggcaaccattgaggccgggggtagcctaaagattgatgccgctattatcaaaaataccaacaacggtttggtcaccgatatcgtcgaaacagaaaaatcccagcgtcatgaagccgtattgagcggccgcactgcccgctatgactggtcacaggtgaatacttcccgtcgcaacaaatacggcgtgcacagagccgtcatgccggatggcagcggaagtgaagaattttacgagtaccgatatacccgtaccatcaatgaaacccagataaaagagagtgatccgggtaaaattttatccgggggtaatatgaccatcaatagtgcgatgctgaccaatgacgacagtcagatcgtagcgggtggaatactcgggggtgatattgacgaactgcacaataacgccaccaaaggcgaacgtatcatcacggatgaaggtagcgaaatccgttggtatgccaaaaagaaaaaacgtcgattcagaggaaccaaaacctcccaaggaaaagactgggaccactataacccagcaccgataaccgaaaccattgacctgaaagccctagcctggcagggcaacactcgtccaaactctaccggcataacaatagatgacaggcagacaagccgtgttcaaagtacaccaaccgggattaatctgacctcaagaatggcggaagctggtgaagttacattcaccaatgccacgatcaacgccatcacactaccgaacagggacataccgactgatcgcccattactttcacctacaggtcaacagactgagcagctattatcgtctggcgcagtggcactaccaagccgagatgcactcactgaacacccaacactttcacctacaggtcaacagactgagcaggtattatcgtccagcgcagtagtactaccaaacagagatgcactcactgaacacccggtacttccacccgttcaacaaactgaacgggtactccccccggtgacggtcactctacccaacagtggtccattagatgagcgcccgctggtgttaccaacaggccaacaatttgaattgacgctaccgtctgataccgtccaaggtcaaagcgtcgaacctcttatccgtatcgttgctccagatacccgcctaccggccaacagcctgtttgtcgtacagccgggcagtgacagccattatttagtggagaccgaccctaaattcacccaatataaaaagtggctaggcacggattacatgcaacaacagttaacccacgacccggtactggcacacaaacgcctgggagatgggttctacgaacagcgcctggtgcgtgatcaaatcacccaactgactggtcagcgttacctggcgggccacaacaacgatgaaactcagttcaaagcgttaatggaagccggtgttgccttcagcaaacagcaacagctcacccccggcatcgccttgagtccatcgcagatggcgctactcacttctgacattatctggctgaccaaccggaccgtgactctggcagatggcacaaaacagaccgtgaccgtgccacaggtctacgctcgcgtgaataaaggcgatctgaccagtgacggtgctctactctccggtaaaaacgtgacaataaatagccgaagagatattaccaacagcggcaccatcagcggacgtgaagtcacccaactggccgccagcaatctgaccaacagcggctttatccaaagcggcaaagtggatttaaccgcccggcaggacatcaccaacctcggcggacaaattcggggccgtgaccgcgtttccgcacaggcagatcgggatatcaccagtgcctctaccctgcgcggagcaggtgctgaccgttggcaagatcggcctgcgggcatttatgtccagaacgacaacggcaccttgtcgctgaaagccctcaacaacatccatctcacggccagtgacgtggaaaatgcgggcaaagacggtcagacagagataaccgcgggccttgacctgactctggataccctgcgcacccatcgcacagaaaacagtgactgggggagcgacaactatcgccatctgacacaacaacatgacgtcggtagccagataaccaccgccggtaacctggcgctgagagcgggcaataacctcaatgctaccgcggctaacgtaaacgccggtcaacaacttaccgctcaggccgggaacaatatcaccctgaataccggtaccgcttcctcagacctgatagaacacagcaaacagactagtaaaggcttactctccaaatcctccgtcgaaacccacgacgaagtgcatgaacgccgggcacaaagcaccacgctcagcggcgaccgcgtaaccttacaaaccggaaatgacctcaacatcatcggcagtaacgtggctggcactcaggatgttcatctggccgcaggcaatcagctcaccatcactaccgcggatgaagcccgtcatgaaacgcacttcaaacaagagaaaaaatccggtctgatggggaccggcggcatcggcttctccgtcggcaaagccagtcaaaaatcgactaccgatatcgacagcaacctcaacaaaggcagcacggtcggcagcagccagggcaatgtaacattcagcgccggaaaacagctcaacattcacggcagtgatgtcgtggcgggccgcgatacgcaactttccggccaaaacattcacatcaccagtgcggaaaacagtcacaccgctatcaccaaaaccgaacagaaacaaagcggcctgaccgtggcactatccggcaccgcaggcggagccctgaattccgccgttcaaacggttcaaaccgctaacaatgaaagtgacagccgtatcaaagccttacagggcaccaaagccgcccttagcggggtacaggcagtccaggcagcccgtctggccgatgctaaaggtggtgacgacaaagctaacaacaatctggtgggagtcagcctctcctacggccgccagtcctcccggtcagagcagaaacagcaccagaccactcaacagggcagcagcctgatgaccggggataatctcaccctcaccgcttccggcacaccaaaccagcacggcgatatccgcattcagggcggccagttgcaggcgggcaaagacctgcaactcaatgccagccgggatatccagctctcatccagccagaacaccgaacagaccaccggcaaaaacagcagtcgcggtggctcactgggcgtcggtttcactgccggaccggggggcacgggaatcaatctctccgccagcaccaaccacggcaaaggccgtgaaagcggtaacggcgtcagccataatgaaactacgctggatgcggggcaaactgtcaccctcaacgccggccgggatgcctcgctcaaaggcgctcaggtcagcggcgaacagattactgccgacgtcaaacgccacctgacgctcagcagcgagcaggacagcaaccgctacgatatgaagcagcagaacgtcagtgccggcgtcagtgttactctcggtccacaaccgggcggctcattgaacctcagcgccagccgcgacaaaatccacagcaactttgactccgtacaagaacaaaccggactgtttgccggcaaaggcggctatcaggtaaaagtgggtgaacatactcagcttgatggcgcagtcattgccagtaccgcagacaaagacaaaaacaccctcgataccggcacgctgggctttggcgatatcaaaaacaaagcggattttaaaaccgaacaccatagtgcgagtatcagcacagggggttcagccggcggcatgttcctcagtaatctggcggccaacaccctgggcggcgctaaccgggaaggccacgcccaaagcaccactcacgccgcggtcagtgacggcaccctgattatccgggataaagaccaccagcaacaggatgtcaccgccctcagccgggataccgaccatgctaacaatgctctcagtcctatctttgacaaagagaaagagcagcaacggctgaaacaggcccaactgattggcgaaatcagtgcgcaggtgattgatatcgccagtaccgaaggggccattatcgccaccaaagcagcccacgccaaactggagaacatcagtgacccggatagagaagcggctataaaagtactgaaggataaaggtaaaaccgacatcaccccggcgcttattaaagaccagatttacaagactgcctataacgcggcattgaatgagtctggtctgggcaccggtggaaaataccactctgctttacaggcggctaccgcggccattcaggggctcgcgggcggaaatatcggtcaggcactggcaggcggcgcttctccttatctggccggggtgattaaagacctgaccaccgacccgaaaactcatcaagtcgatgtcgtcaccaatactctggcccatgccattctgggggcagtagccgccgaagtcagtggcaacaatgcgctggcgggtgcggcaggcgcggcgggcggtgaactggctgcccgagaactgatgaagcatattcacggcgaaaatgctaaagtcagtgacttaagtgaagaggaaaaacagaccatcagcactctttctactttggcggccgggctggccggcggcattgccggtgactccaccggaagcgccgttaccggagcccaggccgggaagaatgcggtggagaataatgcgctggcctcgcgaaatctgggtgattgccgcacgctgtcaccggaagcgtgcggcaaggctaaggagctgagccagcgcattctggataaaggcttgccgtcagtggaggacatgcgcggtaaactggcatcatgtcaggatgacagctgccgtaaaggagtctggacagagtaccggcaggccagtgatgcgaccatcaacagcctgaaacagatggcgttgaatggtgagttgagtcgtgaagaactggcattcatcaaccatgaactgggcaaggagctggccgtctcaggttaccgtgccaatgacaagatagggcgttcagagcagagcagctggttaaatggcggcagcggacccctctccgggttttttaacacggaactgcgtcaaaaagagctggaaaaatcgggcttgtccaaagcggatgcggcgcagtacgtgaaggaagagcagcgcaacctgttgttgctggagactgcggtcggggctattgggggagcagccagtaataagatacaggcgaagccatcatctgtatcatcaaaaaataatgttgataaaagcgttccggcggaagctactcaagtacagcctaaccaaacggctaataaatcaagtacaacaacacagacagatgtcgcaaaatactttggccaggacagaaaatattggtcggctgagccagttccctttaagggaaataaggtttatcaacgaaatgacttgtttgatccaagccgtattgatcctaaatcaggtaagacaaacgtagagcttatgagagctggtagagcacctatcggtaatgatggaaaacctgtcaatttacatcatatgttacaaaagcaggatggacctatagctgaggtaacgcagagttttcataaggataatcataaggtcatacatataaatgataacagtatcccctcaggtattaaccgctcggagtttaataagtggcgttctgattattggaaacaacgagctaacgattttaaatagggttacgtatgaatactaaacttaatgatgttattgaagaaatcgaacgcttatcagatggtcaaagaaatgatgttgatttgccagatgatgaattaatttctcagtatgaaaaagaaattggtttcgaattttcaaatgattataaagaggttttgaaaaaaataagtaatatattctacggaactatagatttgttatctgttacccgtgataaaaaatattatggagaactgtcacaagcgttaagcgatgcaagagagcaagggctacctgaaaatttgctcccgatctgtgaagataatggcagttattattgtattgattatgacggaaaaattaagtactggacgcttgatggttataacgaggaaagttggcctgatcttgctagctggataaagcaagtatggatagaaggtaattagtcatgctaaagatcccagcgcttggctgggatcttttttgagccgtcagttgtactcaacgagccggataatcaactgcccgtgctcaacactgacctgtactggctgtccggtggcaaagcccgcttcttccagccagttgcctttaagatgcaaactggggtgctggctgtaatagcgggtcataccggtgctgcggtcttcgtggcgggtgcgggcataccccaccttatagctgcgccgggcttttgaaatcgctaaatctgcattacaatcgcggttagccataaatcaactcctgcttagttggttgtggttagcggttgtggcaggttgccgcctgctccatccgcgtaaaaaaatcctttctcttagctgtctgtcttttactgttgtgcctgtgcaattaccgcatccagcatctctgaaaccagcttctgcttagcgcggggcaactggctgataatctgtatctgttgctcaagccgtgaagccggtccccgtttacgggggatcgtgtcgctctcttcgccgaacagttcttcgagcgagacggaaagtaactttgctatctcaggcagaacagagatctggatccgtcttctgcccgcttcccatgactgaaccgcttgctgagaaacgttcagtgcctgagccagttgcgcttgtgtaagtccggcgtgtttacgcagggcagaaatccgctgacctaacgtcatcataaatacctgttcttcactactgatggaggcggccatagtcgttgttaccgatgtaaaaagtgactgaatgaccctaatctacaacatgttttacatcttactgttgtaaatactaccagctgtagtatatgattgtcgagttatttttatccaaaccctattgacaggtttttacaggaggtcactgatgacccgcgttcccgataccgatttagcccgcttaaagcaaaccgtctcgttactggggctggcgcgtaagcaaggccgtccgatgaaaaaacgcggtgaggattatgtgctgcgctgtccgttccataacgagaaaacgccctcaatggtgatatcgcctgctaagaacctgtatcactgctttggctgtggcgcagcgggatcggtgctggactgggtgatacaaacggaaggggtgacgctgaaaatcgctatccgccggctgcgggagctggccgggttgccggatatggacaatgcggttgtggccgcttcttctttagccgccccgccgggatcacaggcggcacctctgccgcgcccgaaactggccgacctggacgatgacgggcaggcgctgttgcatcaggtgattgatttttatcatcagcacttactggcgtcaccggaagccaaagcctggctggagcggcgcgggctgaaccatcctgaactggtcagccactttaaactggggtatgcgggccatcacggtatcagcggttccgcggggttgttgccgtccaaagacagtcaggaaggtcagcagttgcgcggcaagctgtcggggctgggcgtgttgcgtaccaccacccggcaggaccacttccggggctgtgtcgtggtgccgataattggctgggccgaatcggccagtgtggccagccgcgggcgggtgctgcaactgtatggccgccgaacccagccggattacaaagtgctgaaagacagcccaaagcatctgtacctgtcctcaccactggccggggtctggaatgaggcagcgatgaaagccgctgcggaaattatcctgtgcgaagcgctgatcgatgctatgaccttctggtgtgccgggttccgcaacgtgatcgccgcgttcggggtgaacgggtttaaccgtgagcatctcgaagccttgcagtatcacggcgtgaagcgggtgctgattgcctttgaccgggacgaggccggagaccgtggcgcggctaatgtggcggctgacttactggaagccggtatcgaggcatggcgggtgcagttcccgccgggcatggatgccaatgactatgcgctgaaaagcggcaatgccgaacatgcgctggggctggccttgcaacaggcggtctggctgggacagggaacagcgccgggcgcggtgttcagccatgagcggcccgtcttgccgacggtgacggaaaagccccaaagtgccggggtggctaaatcttcttctttagccgccccgccggcgctgaccgttgcccccgtgccctgtgagcgcacggcgtccggtgagttgttgatgaaaagcggcccccgggtctggcggatacgggggatgaaaaaatccccggtaccggacgtgatgaaagtcaatgtgcaggtgcgggatgaaacgtccggcctgttccatgtggatacgctggacatgtatcacgcgcggcatcgtcagcactacatcagcacggcggcgcaagagctggaatgcgagctgtcggtcatcaaacgcgaagccgggcgggtcttgctgatgctggagcagcaacaggacgcgcaacagcaagccgacgccgaagcctcagggacaacggcggtgacggtcagcgcggaagacgaagccgccgcgctggcgttgctaacatcgccgaacctgacagaacagattatcaacgacatggccgcctgtggggtggtcggcgaatccaccaatctgctgaccgggtatctggcggcagtctcgcgcaaactcgataaaccgctggccgtgttaatccagagcagcagcgcggcaggcaagagcagcctgatggatgccgtgctgaacctgatgccggaagaggagcgtatccagtactcggcgatgaccggacagagcctgtattacctcggcgaaaccagcctgcaacacaaaatactggcgatagccgaagaagaaggggtgcggcaggcggcctatgccctgaaactgttgcagtccgacggcgagctgaaaatcgccagcaccggcaagaacgagcagagcggcgaactggtgacgcgggaatacagggtacagggaccggtgatgctgatgttaacgacgacggccattgatgtggatgaagagctgctgaaccgctgtctggtgctgacggtcaacgaatcgcgtgagcagacgcaggctatccacgccatgcagcggcaccgccagacgctggccgggttgctggctgactcggagaaaggctatctgacgcagttacaccagaacgcccagcgcctgttaaggccgctgaaagtggtcaatccttacgcccatcaactgacgttcctgtcagacaaaacccggatgcggcgcgaccacatgaaatacctgacgctgatacaggccattgccctgctgcaccagtatcaacgtgaagtgaagaaaaccacccaccgcgggcaggtcatcgaatatatcgaagtcacccaggacgacattgccctggctaaccggctggcgcatgaggtgctggggcgcacgctggatgaaatgccgccgcagacgcgcaagctgttactgctgatacaagagatggtgaacgcacaggcgcaaatccagcactgccagccaaatgaagtccgctttacccggcgggatatccgcgcctttacccactggagcgacagccagctcaaaaaccactgtcaacggctgacggaaatggaatacctgctgttgcatggcggcagccgggggcacctgctgcattatgaactgctgtgggacggagaagacaacggcgcagcccacctgtgcggcctgctggatgtcggagaagcggactcagaaaccgccggcagtgaacgcaagtctgacccggaaggtcgtaagtcttccccaagtccggggcaagtctggcctgagtctggggaagaaaaacccgcgtcagcccagacagaacaagggccggcaggggcacaagtccgggcagatgaaaacgcagttattaaggaaaataatcacagaggcgcattgcccgtacccgacagggataaaacgccggcagccgtcccgacaggtcatgagagcaagtctgacttaaatgaacgccagtctgcctcaagtctgggccaggtccgggctaagtctggggtaaaaaaatccccatcagggcaggcagaacacgggttcagcgtaccgcaagtcggggtaacggaagacaccgtgataaaaggaaaaaagaaaacacgccccttgtctgcgcccgcccctcaatctcaaccggaggtcaatcatggcaaaccgtaaaccccgcaagggaagtctcctgaccgtcgatgacgtctaccgtcagcctgtcggtccggcacatgacccaaaaagcctgtatgcgctgctgctgcgcttcgtggcctggcggcaggaacggaactggtcggaaaccacgctgaaagtgcagacccatcacacctatcactttatcctgtgggccacggaccggggcctgtactatgccgcggacatcacgcggccaatactggagcgttaccagcgctacctgtaccagtaccgcaagaccaacggagagccgctgagcatccgcacccaacgcacgcagttgcagccgttacaggtatggttcaaatggctgacgaaacagaacctgatactggcgaacccggcagcggacattgagttgccgcgggaagaaaaacgcctgccgcggtatatcctgagcattgatgaaatcgagcatatcctgtcgctgcctgacccgaatacgttgcagggcgcgcgcgaccgggccctgatggagctgctctggtcaaccgggatacgacgcagtgaagcggcccggctcgatatctacagcatagacgggtcacgcaaaacggtgaccatccggcagggcaaggggaataaagaccgggtattgcccctcggcgaacgggccttaaactggctccagttctatcagcaacagattcgcccgcaactgctggtcaccccggacatccaatcactgttcgtggcaatggacggtctcgacgggttgcagccgaacggtatcacgaatgccgtaagcggttatatccgggccgccggcattgagaaaaaaggtgcctgccacctgttccggcatgcgatggcaacgcagatgctggagaacggcgcggacctgcgctggatacaggccatgttaggccatgccagcgtggagtcaacccaggtgtatacgcaggtctctatccgggccttgcaggcggtgcacgccagcacccatccggcggagcaaatggccgacgaaaaagtccgcgacgccgatgaggtgggtttactggccgacctgtacgccgacgataacgccgacacggacacgccgccggacagttcagagccgacctcaaccgccgatagccgctgagcgtccgcacgcccccgttgagttgggcgggttcggtgtgggggcagaccgtggccggactgcccgtcggcatcggcgcacgcgggggtaaatagtcgtcaggcggctcaaccacgagcgtccccgttaagccggtccaggccgcccaacgcctattgaacataatgcgggggaattatacgcactgcgccggtgagcccgggcaaccgcctgagcattgatgagcggcttaatgcgtataattggcattatgtcttgcgcccccgcgggtcagcattggcgggtgtggcgcacaaggctgcgccttatgctctaaccgactgagccggacatcggcaactctgagttcttctttagctgccgtgccaacgtccggccaacaaccctgaaggcagatcggcctgcggcctccgctcattgacttccccccgccccaaccccgctgcactggctgcgcccggttcgcagtcgcaggctccttgctcattcccgtgctcgccatcgccgccccgtgcagcccccgggggcttccctgaacaaaacaaaaccgcgtggtcatgcaaggtcatacgcaaaccgaagccacagtgcctcagagcatcgcaggggcgccgcttgcgggctctgtgccgcccgcgcccgcagaacgggcacccgccgcccaagcgagttgggcgacgttcgcccgttgccgaaaaaggcgctacactgaccagagcgcggcgggaaaaaccggccttcgggggcgaaaagcgcgtcagggggttttggggccggcggtgaacgcccattggaaaaaacgggtggtaactggctgagggcattgggaaaatcggtgtttggcggtcaacgtcgcaatggaatgggttgttgtggagaataatttcctgacggccaaagatgtccacgaactgaaagaggaactgctggaagcagaaaagactggcgcaaacaagcagacgatttacgacaagtttaaggagcgtagcgagaaaaatcgtcaggaaggtgtcgcggataactgctcccataatccgggctgtgtggtatccgtctgggaaatgatgaactcgggaacagacgtcgccagtggcctgaaccggacttctttcttctccagtctcagtagtgaggagatggcacagttaaaccgctttgtgcaggcggagaatgcggaaagtgcccaggcgatttaccagtcgctgccagatgtggtaaagaaggttgttgaaggcaaggagttcgcagaacagtttggtgtaatgccgaaagtgggcggcagtagcgggataattggactagggatagccgggaagaagcctgcgacaaaagacacaggcaatacgggtacaaaaggcactaatgctgctcataatcagcaagttaataaatcaaatttagctaccgcagagaaagacattgtacttattgaacaaggtaagaaaggtggttggagtaaggtactgaataagcctgaacccaataaaatttatcatgtaagacatgcaagcggggagaaaatttatcatacagatggattaagcaggccagtccatatcgaaacttcactacatttatccaagaatgaccgtaatacttatcagcaatgtaaagcaggtaaatgtggtaatccgggagatgaaggcgggcatttaatcgctagtatttttggtggcccaggcgagcgattaaatgttgttcctatggatggaaacttaaataaaggtgcctggaagcagatggagaattcttgggctaaagaactaaaggcaggtaagaaggttgatgtgaaaatacaacctatatatagtgataatagtaaccgccctgtcagttttaatgttacctataaggtagataatgaaaggccaataagattaaacatagataatgttcctgggggcaagaaatgagtctagatgataaaatatatgctgagatcggccaattgttatataacgcagctcctgataatgcgaaaaaaattattatggatacggagttatctcctgaaggtgattgttgtcaatttaaatatgattacatcgattccaacgatgaaatgcgctggtttttacctgaagacgggataatagatcatagattgagggaactattagtcacattaagacaattttttatagaaaatgttcattcagagagaaaacctcattggtcgggttgtatagtcactattgatgtagaacaaatgaagctcaatatagacttcaaatacgaaaactaatctgaaagagatctcagccaaggcgctgggattttctctgtagccatcaattgttctcaacgagccggataatcaactgtccggcctcgctggtattggtgatcggtttcaccatgggtaaggctaaacaaaaaaatcggattttaaaaccgaacaccatagcgtgagtatcagcaccggcggttcagccggcggcatgttcctcagtaatctggcggccaacaccctgggcggcgctaaccgggaaggccatgcccaaagcaccactcacgccgcggtcagtgacggcaccctgattatccgggataaagaccaccagcaacaggatgtcaccaccctcagccgggataccgaccatgctaacaatgccctcagccctatctttgacaaagagaaagaacagcaacggctgaaacaggcccaactgattggcgaaatcagtgcgcaggtgattgatatcgccagtaccgaaggggccattatcgccaccaaagcagccaacgccaaactggagaacatcagtgacccggatagagaagcggctataaaagtactgaaggataaaggtaaaaccgacatcaccccggcgcttattaaagaccagatttacaagactgcctataacgcggcattgaatgagtctggtctgggcaccggtggaaaataccactctgctttacaggcggctaccgcggccattcaggggctcgcgggcggaaatatcggtcaggcactggcaggcggcgcttctccttatctggccggggtgattaaagacctgaccaccgacccgaaaactcatcaagtcgatgtcgtcaccaatactctggcccatgccattctgggggcagtggccgccgaagtcagtggtaacaatgcgctggcgggtgcggcaggcggtgaactggccgcccgagaactgatgaagcatattcacggcgaaaatgctaaagtcagcgacttaagtgaagaggaaaaacagaccatcagcactctttctactttggcggccgggctggccggcggcattgccggtgactccaccggaagcgccgttaccggggcccaggccgggaagaatgcggttgagaacaacttcctgaaggcaggtcagatcacctcatggttggaaaaatataaagcatcatctactgatgaagaaaagaatcgtttaattgaggttgctagtaaagctgatcaagatcagcaacaaaaagctattgaaactaagatttcaaaagattatctgatgaaacaacaggaagagttgataaagcttattcaatcaccaaattgtgacgctgactgtacaaaattaacagaatatagccttaaccagattagcccagtaattgataattacgatacattgcagaaaagcaataatatcccacgggcagtaattgcaacaatttctctagccttaccgacattagctaaaacggctacacctgctgttactaattggattggaagtacgactattgcaaacagagctataggtgtaggtactacaggcttagccaacctaggaatgcaaggttacaacatctacaacaatcctcaagaaaactttagctataccagtttcgggacatctttgattacaggcggtgcaacggcaggaatggggtattggggtactgctgcgactaatacattaggagcaggtgtttctagcgtaattgatggaaattctccgtggttaccaatgggaggcgcgtttgtaggatcatcagtaggttatggagtgacaaagggaactactaactatttggataataaaatgaatccttggtcaaatggatttaaagaaagattcaatttaatcaatccttcgatatctgcaccaccgttagtatcccctgctcctggcattgttggtagtgcagtaggagctgttggttctgaaactgcaaataaagtaatcatggatgagttaagctctaaggataaaaaatgaaatttataatctattttttatattggtctttagttcagagcataggtgtgttcatcacggtcatggcggtaaaactgttagttaaatttgttctttattttgaaactggcgtgtttttcatcggttataaagatattgttgaggctattggaataggtgttgttatggggatattcctaggtggtgttatttgtttgataaattatcttcaacataaaagattttaggaaaagtttaatgtcgtcataatgttaaaaagatcccaactaaagtgaactaccccccgaaagttggacacccaacaagtagggggaagttctgcatgaagaattacagtaagtgtttgatcacatttaagcggacatcgcttcatcagacctggtagaacacagcaaacagaccagtaaaggcttactctccaaatcctccgtcgaaacccacgatgaagtgcatgaacgccgggcacaaagcaccacgctcagcggcgaccgcgtaaccttacaaaccggaaatgacctcaacatcatcggcagtaacgtggctggcactcaggatgttcatctggccgcaggcaatcagctcaccatcactaccgcggatgaagcccgtcatgaaacgcacttcaaacaagagaaaaaatcgggtctgatggggaccggcggtatcggcttctccgtcggcaaagccagccaaaaatcgactaccgatatcgacagcaacctcaacaaaggcagcacggtaggcagcagccagggcagtgtgacattcagcgccggaaaacagctcagcattcacggcagtgatgtcgtggcgggccgcgatacgcaactttccggccaaaacattcacatcaccagtgcggaaaacagtcacaccgctatcaccaaaaccgaacagaaacaaagcggcctgaccgtggcactatccggcaccgcaggcggagccctgaattccgccgttcaaacagttcaaaccgctaacaatgaaagtgacagccgtatcaaagccttacagggcaccaaggccgcccttagcggggtacaggcagtccaggcagcccgtctggccgacgctaaaggcggtgacgacaaagccaacaacaatctggtgggtgtcagcctctcctacggccgccagtcctcccggtcagaactgaaacaacaccagaccactcaacaccagcacggcgatatccgcattcagggcggccagttgcaggcgggcaaagacctgcaactcaatgccagccgggatatccagctctcatccagccagaacaccgaacagaccaccggcaaaaacagcagtcgcggcagctcactgggcgtcggtttcactgccggaccggggggcacgggaatcaatctctccgccagcaccaaccacggcaaaggccgtgaaagcggtaacggcgtcagccataatgaaactacgctggatgcggggcaaactgtcaccctcaacgccggccgggatgcctcgctcaaaggcgctcaggtcagcggcgaacagattactgccgacgtcaaacgccacctgacgctcagcagcgagcaggacagcaaccgctacgatatgaagcagcagaacgtcagtgccggtgtcagtgttactctcggtccacaaccgggcggctcattgaacctcagcgccagccgcgacaaaatccacagcaactttgactccgtacaggagcagaccggactgtttgccggcaaaggcggctatcaggtcaaagtgggggaacatactcagcttgatggcgcagtcattgccagtaccgcagacaaagacaaaaacaccctcgataccggcacactgggctttggcgatatcaaaaacaaagcggattttaaaaccgaacaccatagcgtgagtatcagcaccggcggttcagccggcggcatgttcctcagtaatctggcggccaataccctgggcggcgctaaccgggaaggccacgcccaaagcaccactcacgccgcggtcagcgacggtgccctgattatccgggataaagacaagcagcaacaggatgtcaccaccctgagccgggataccgaccatgctaacaatgccctcagccctatctttgacaaagagaaagagcagcaacggctgaaacaggcccaactgattggcgaaatcagtgcgcaggtgattgatatcgccagcaccgaaggggccattatcgccaccaaagcagccaacgccaaactggagaacatcagtgacccggatagagaagcggccataaaagtactgaaggataacggtaaaaccgacatcaccccggcgcttattaaagaccagatttacaagaccgcctataacgcggcattgaatgagtctggtctgggcaccggtgggaaataccacactgctttacaggcggctaccgcggccattcagggactcgcgggcggaaatatcggtcaggcactggcaggcggcgcttctccttatctggccggggtgattaaagacctgactaccgacccgaaaacccatgaagtcgatatcgtcaccaatactctggcccatgccattctgggggcagtagccgccgaagtcagtggcaacaatgcgctggcgggtgcggcaggcgcggcgggcggtgaactggctgcccgggaactgatgaagcatattcacggcgaaaatgctaaagtcagcgacttaagtgaagaggaaaaacagaccatcagcactctttctactttggcggccgggctggccggcggcattgccggtgactccaccgaaagcgccgttaccggggcccaagccgggaagaatgcggtggagaataatgccttaagcttgccaaaagggatgtcggattacggtcgggcacagagttcactggcaatgaagatgtacaaggaaggggcaacaccggatcagatatccgaagagctggcgaggcaagcacggggcacccatcccgaaggccaagatccagccagagggctgattgtagcgtgggggaacttcttcggtgttccgttggatgtggttatgtccaatgagaaaatgacgccggagaaagccgctgaaattgtgaccagcggcatcccgaccagtgaagcgaaggtgatgcagtatgtggcggctaaggcattcttggcactggctaaaaatcctgtttcgggtagcaaagcagaaggttcatcaccgcaatggaaagtaggagaagggaaatttagtccgaaggataagggcacagtgacgaatgttgagcatccggttggtaagtttgatggaaagtcactacctaatggaaaagaaaacattgcaagtgacaagacaatcaaaaatgacgtattagagcatcaaagggttggaagtggcgagaaaggaactgtagtggaaataaagtagatcaactacctaataaaactgttgttgatattgatgggaaagaaatatctgtttattcaaataagagtaagccaacagcgacacaagaatttccttcagtagctaaggctcatggtttcaatgatattgttgacaattatgctggcttagcaacacaaacgaaattgaaaaatggagccactctttatcaattgccaggaaaattaaatggggttgaaggacgatttgagtggatagtagatccaaaattaggtggtgtaagccatagaatgtttgttactggcggaacagtgaatggagtgccatcaaaaccatgatgaatgatatgtacttgttagctaaaaaaatggaattacttgattggggaatgatttttcttggagccaagggaaaccctgttggtcgtttatctgctcctaatataagtgagtttgcatgtaatgaattaacaaaacttgatctgtctgattcaattctggtcgaggtgtctgaagctgcattttgcacagaaatcaatcgtgaagtgatcgatagcttagaagtcatatgtgataaaaaaaatataaatatacagttatcagaaaggaaatggagatatgtcgctttatatatcctattactcaatgaattgcctgatgattatgtatatggtcttctcaaattaaacgagttttggaacctttggggagatagtgttgattcaccgaatatagtccaaggtgttggtaataatctttcaccgacagaatactattcggaagagaattaccacctattgatagaaaagcatcgtaactggttagatagagagattaagcaattgcaatagagttgatacagatcccagcctaagcgctgggatcttccctttagccgtcagttcttctcaacaagccggataatcaactgtccagcctcgctagtattggtgatcagttttaccatcggtaaggccaaacaaaaaaagcggattttaaaaccgaacaccataatgcgagtatcagcacaggtggctcagcctgatggatagaagagattagccactgttcaaacaagaactttcaaatgacagaaagaatagagcttattgagttgatttcaggattagatagttatcttgaaaatggctatgtaaatgcggattcatacgaagatccttctgatgatgcgatagattatttaggagaacttttattgaaagattctgaatgttgtttggatttttgtaaaaaaatcttagattcggatctttttaacaataattctgttaaatctactgctttagattttttgattttatcagaatctaattggtttgaggcttttagctatttgctcaataaagctgaaaaattatctactcctgaattggaaaaagcattgttttacttttattgcgcaaaaaacgatcctaaaccatatcctgttcctgaaggactttttaataaattgatagaaaggtaccaggtactaaaaactgaatctgatgcaaatttttgtcatctgcatgaaacatacaacgattttattaaagcttattcattgaaattttgattaattgtaaatcccgaccactgtgaaccgcctccccaaaagtaggatacccagcaagtaagggaaagttctgtatgaagaattgcagtaaacaattactcaaatttaagtgtaaagtcgcccaatattatctttctaccaccagatgagataactagatgattaataaaatcaaacagtttacactaaatcggctaataacacctgagtccgaaattctgccggattcaggaaatttaattttgagccgagttatcaaactgctgataattttttcaatatcgaataatacctcattacaccagcaagggtaaaaagcctagcagattaatcagccagaaaagtgatcaccgttggacaggtattttagcgttaacaaagcacgaaaaaagtttagaaaataaggatatgaattgattttaatcccagatcacattaaagacataaaaagcagcatagtttaaatcaaatcgtagactaaactgattaaaacagtgtaaagccgtttaatccagagtattttacagttttacataataaatgaaaaataataacactgtaattaaccagattcgtattctgttaaatcattcacttgaacttttttatgacagattatttaactggtttatggaaaaatttataccatttaaaaaaattattaaagtctgctcctttgggaaaatagattgtttgattaaattactcatatgatcatattccctcttttccagaaacatgaacattaacaaaaccaatttttttcttatttttcactgaaatatttatgatagacggcttttaagctactattaaaaatcatttttttaatctctggttttaatcggcataaggttttaaccgttatttttatcctttatacattttatttttactggctctgttttactggtaatcctgagtggtttttatcaatcagtcggtaaatagcctgacgatattaaagatatcccttgatgttttttccgataacccctcttttttttaaaaagcttaaatccgaccagattaaccgttttatctcttttttattgcattatttttatagcttacgccttaaaatgacggtgagaaaacatctcactttcagttcattaaaaaactttctctatcgtgctgattgttttttaacttgccattaatggttaatgggtttcgattaaatgtcattaactgccctgctaaaaagtgaattttattatgttaaatcaagctgttatataaatcctttaatctatccgcactcgtattttcaaatgattatggccgtaaataggccgtttttaatcactctataccttttacaaatctggcattaatggagtacctgtttttaccccttagctgactcatcaacgataaaaaggattttattatcactagaaaagatttaataaatggtatttacgttttatatcccctatttatcttacccattttcattaaatttgcattcattttgctcgtttctccttttcatgcatttgatttttcaggtttaaaaccaaagaaggtaatagattaaataatggtattaagatcaaagtccattttttaaatgatttttaaaatccggttaatcctgttaaatgttttgaatcagttcagggatacgtaaacactaaggttttttcaagagttaattgacctcttgaaaatcgttcattatgttttttcccctaatggcggcgcatttcataccagctctgatccagtatcgcgcgatttaatccggattttgccctgacgtggcgcccggggtgttcaaccatccccgccgctgattttgacaggtttttcacctttaagtcctcaatgacgatcatggcgtggttttcgctgatagtcatcgtgactttatgaaggtaatctttgcggatattgcgatacgggcatgtatgctctggattttgcgtttctacttttgccaattattcctctccagctttatgtcggcgggagtaccctttcgaaggaaaagatggcaccgtgacttttagcatggcctcagtgccgccgatataatccttccgctttttcagagaaaaccttttaatttccagctagttttcaatatatatcttagctattttctcaaataaagagcttttactgacctcccttaaccttaatatatcgttggtaaaagaacgtaggaaaatagatgtgatattttgttccatcgcatttatctgttttccctctttatccatagtcagaatattgtaaattaagttctcttttgcaatcgtttgattaggtgaattgcatggtgatacaaaatacaataaatcatctccccttggttgaagataaatatgttcatactggctattctgtttaggcgctaagtaatagggcaaaactgtttcaaaagcatcaattatattaccacgtttttctgccgataaataaattcgtgaattataaaattcaggttctatttcataattctcttcaagctcttttagaaaaattcttttaatatgcaatcctacaatcgcagaaaaaacattgcataaaaatttgctattttcttcaaatttatcaataaatccttttatgtcatattcctggtcggaaagataaaaaaagtgaactgctttacagaccgctggcaaaccccattcaaaataatgaggtttgtttttttcattatgaaaaatgctgtgtccattttttctcactaagctggtctgagcactcacccaaatgccattttggaccctgctacactgaatattcccccatccacagataaaaataataaagccttgcgatcagcaactctatctgcttgatattttgaactgttgctaccaaaaggcattgtattttcactttcagcaacccacaaaaacgggcctaatggtgcccatgatactgctttaataggtacaggggggcacagctcgctgttcgttccttgatttgtgcagattgacactggttttcagacgggtgctgtcagtacagagtacccgtccaccgaccaatctcttggcaatcgcttactcaacaatgttgtaaaaaatttgccggaagacctcgctgtgactgaaacgacgacgacatttctgactcagggttgaggaatcggggaccttctctgtcagtccgaggcgcagaaacccgtggtaagccacattaacctgaatttcctgtaccagacagcgttcactggaaataccaaataaaactagtccagtaacatcatcttgagcaacataactggatcgatagccggtcagccattattgtggcaatacaatgggactactaattcgcggataaattcgaaatcaatgacggcatcgacttgacggaccaaatgatttttaagggccagctcgtcaaacaagagcgtttctggtgagaaagtctggagagggggtgttcttaacatggccgcaaaccccgtttggtgaacggagcttaattaaagcaaattgcgggttgaaaaatcataactttgtcaataacctgactgtaacatattattaacatttattgtgatataaatcacaattaaaaagaaaataaaaagacactgtgaatattataaattatatagtgaggtgactttatgaaaagtcatttttaaaattaaatcgaggatataaacatgcaaaagaaaacatctgttgaaattgaggtcgaagttgaagataaagaaatgacctgcggttcatacaataaataaaaatattggcgtatggctaaccaatttggttggccatgttctacataaggaagcagacatgagaatagcatgtggttttaatcctaattttcttagcggtgaaatacacataccgagtaaagtatcgatgatagaattagggattactgcatacaatattttatcagttgcagaaaaaagaactccattcgaaagatacaatggaaaattctctcttcacatcgccagaagtgcaataacagaagatattcaatcaggctgtaactatattaataacattatgccacgaataatcaacacggaaaaaacaattagcattggttttcatttgtgtggaaatagaaaagataacattggtaaatatggttttactccccattatgaaagaagcaagaggaaagaaagaaatgctataaatttcttaaaaagggtttctcacacatatcagatagatacatggatagaaaattcaaacttttactctggtggaccaagtgagatctctaacgcgataataagcgcgaattacataagtaaagaaagtaattctaaacaaatagttgacctggctcatctaatcatcaattcagtaaatgcaaaagttgatcctcttatatttattggaatgatagattgggataatgtagtcgaggttcatctatcaggaataattgagggaaaggatggagcatttcatgatggacatccagagagaattcatcatattgtttgggattcttttgagaaaatagtttccagcaaattaatcaaaaaaaatttctatataaatattgagcacacagaaaattcttggttaaagaacttatctggttataataatgactttgaaaaattgaattcaatattattaaaaaataaagaaacaagtaaaccctcaaataccaacatgagcaattatgcgaaatcatacctatcaaaaactctgctagcagccataaaaaacaagaaggaaattgaaatcgctaagtcggaaaacattgagtcgcttatatctagttggatattaagtatagaagaaagtgaagtaaacctatgcctaacaaaagaagaggaagatgaaactataaattcagttcattatttaaaatcattcgaaagttttgtgaataggtgaatcatgaaaataggaaccaattggtcgggaaatagagaactaagcgttctaaaggagataatatcattaagaaaggtcgatttcatagagatattaatagataactttttgcagtgcactcctgactcaatacttggcataagcaaaggattaccgatagcgtttcatatcatgaactctaaatatatgcacagaagcaaacaagatttagagagtatagggaaaagaataaaattactccaaaaagaactaaaccccatatatatatctgatcatgttggtattttttatcataatagctatcctttaccaacaatgggtgaaatagattactcttctgaaaaagataaatacttcgattcagtaagcctttggcaagatataattggcgaaaaaatttatttagaaaacttcccttcaatacttgatgaaaacgccaagctacaaccagatttttttaaagaaatgacaaaaaaatgcggtaatggacttttgttcgacatatcaaatgctgtaattgcacaagaaaacacgggaaccccatttgaagaatggcttgatatagaaatgaaccatcttcacattggtggttatgcagaaacatcattacgccctagttttttggttgacactcatgcagatagaatatctaatctttcattaaagtattttaataaattgggaacagaaagtaaggacaatcttacatcactatctgttgaaagagatgataattttgtattaggagactggattaatgacatcgaattatgcagacaatagaaattgttactcttatgttgtaactggagaatccgcattagaactaccaaaaaacaaatcagactctctatctaagctcatgatttataacataactaatgtactaaacaaccctctgagcagatctaaagctgaagtttcttttgaagaagtagaagaatttatacgttgggcaaacaaaaggaaatatcatctcgattggagaatatttgcatactttttatctttcagacatgaaagtaaaaagcaccttacagatgagatgatgaatgatttattaatcttctcagcaagccaatggacttattttgataaaagcgagaaagaagagataataatatactccaagattaaagaaggatataagtttatagcaaaaaagtcaaaaaaagcgtcaattgcaagaaagttatacatagctaagattgatattatggataatggacatcatgatggaagaaaagaaattatatatatttgacaagggtattatattgccatcgataacaatgtttaagagtagaatgttaaatatggcaatgcaacttattattaccgcactaatatatcaattgtctacagacgatgccggattttttttactatcatcacagttggttcagatatttgttgttgcttcatgtacctttttcatcggcattaatataaaatcagacattaaaaataaaaactacacttacgaaaactacacttggcttctaataacagggacggtaataggcttattaataactctaatatctgtggtatcaatacattattacagtgaccatacagtaacgaaaaaaatagcatggatactatcaatcggaattataccattatgtatatattctgttaactgcgcaattctagagtctacaaaacaagaaaggtacatggtaaaagtcaactcattcagtatattaacaaatgtattcgccctgattgcattatacttatttactggtgatttaatattttctattgctcttgctatcagtatctcaagggcatacatggccatctcatcttcaatcccattaataaaatttataaaatggaaaaaagttgacttaccttacattaaagatattgtgaatataggaataaatgaggctttaacatctacatcattagtgatattgatgtctattttaataaggtttgtatcgacattaatttcaaacatagaattatcaaagttatttgtttacatgggggttatgaattatctatttgtcacgggcttttctgctgttatttcattggctgcaaattacagaagtgatgaaaacaattttttaaatatagctataggtaccaacttattttaccttattatcttttcaaccgtctcaccattaatcagtttgatggtattcaatacgctaacagaaacaatagatataataacttgtgcattagtcatattctttgacttgatttccttatctattattaacagaataaggagcaaatcaccaaattcaaaatctgtatatcttaaggtgattcccattaccaccatacttgtggtcacctctacattaattagcccgacatcattcgaaatcttattgatttttgtatgcagtaatatactgtatacgctaatttcattaatatggtactcgctatggaaaaagaaatctttatttttagagaagttaacgtagaagatgcaaacaatctcattgttttttttaatgatttggataacacatcggaatttatgttgcttgagccagaagaaagaaaaacaagcgttgaagaacaggcggatataataaaaggattcggaaaagacaggcaaatgttaatatgcgaagatagcaaaaacattgttggctttattgttatatctagaggggtgttcaataggaacaggcatctgggttctattgttcttggagtaaaaaaagaatatagaaataaaggcatagcaagaaccctactcaacaaagcgcaagattggtcacggaaaaatggagttagtagacttgaattaaccgttgcaataaaaaacacattggcaataaagctgtatttgtcatcaggttttattttttctggcatcagaactagctcactatttataaatggtgaactgacagatgaatactatatgactaaaggaatatctgaaacagtaatagacaatgtaacaaacaaccggtgattaagctaagattttttgtggaaggaacaatataccctatggatttcaagatggatcgcggcggcaagggagtgaatccccgggggcatagataacgatgtgaccggggtgagcgagtgcagccaacaaagaggcaacttgaaagaggacgggtatacctcacactttaataaattgggaaatctaaacgtctatacttcttaacatctaaaataaaactaatatattccttttagctatatatggttgctattcattctttcaaacaaatacatatacagcgttatcctccataactatctgaatacaacggattatctggatatgatatgaccacatcacgctctgttctcgatatgattggtaataccccattgctggagttaacgcatctgaataccggtccatgtcaattatttattaagctggagaatcaaaatcccggcggatctattaaagatcgcgttgctctttccatgatcgagcaggcggaagaacaagggttacttcaatctggtgggacaattatcgaagctactgctggtaataccggcatcgggttggcactggtcgctgccttgaaaggctataaattgattctggttgttccagataagatgagccgagagaaggtgtttcatctgcgtgctctgggtaccgatgtacgtcttactcgttctgatgtcagcaaaggtcatccagagtactatcaagattatgccctacgtctggcgcaagagatccccggtgcttattatatcgatcagttcaataatccggctaattcagcagcgcatactaccactaccggaccggaaatctggcagcaaatggaccacaatgtcgatgccgtggtgatcggtgtcgggtccggcggtacgctcggcggtttgagccactatttcgctcaagtttcgccggaaactgagtttgttctggcagatccaactggttctatcttggtagactatatcgaacacggcaaatatggtgaggccgggagttggcaggtggaaggtattggcgaagattttgtccctcctctgggcaatttcagtcgagtgcaccacgcataccgtgtcagtgatgcagaagctttctccagtgcccgtgatctgttgctaaaggaaggtgtgctggcgggttcttccagcggaaccttgctcgccgccgcactgcgctactgccgtgcgcaaaccacccccaaacgtgtggttacgctagcgtgtgacagcggaaacaagtatctgtcaaaaatgtttaacgattattggatgctggaacagggattccaatcacgtgtgcaacagcacgatctcagcgattatattacttaccgctatcaggatggcgctacggtttttatatcgccagaagatacgttaaaaactgcacatacccgaatgcgcttgtatgagatttctcaattaccggtgctgaaagaagagcaagtcgttggcattatcgacgagtgggatttgatgcacaccgtgcaggctgatccacgcaattttagcctgcccgttagccacgccatgactcatcaggtgagaacgctggataaaaacgattctctgcaacaattgatggcaactttcgacgccggacatgtggcgctgatcgtcgataatggccgttttcttgggctggtaactcgcacagatgtgctgaacgcatggcgtcagcaacttaattgatttttaggaatgactttatgaccaagttcgatactaaaactgttcacgccggctacacaccagatcacacgggtgcggtaatgccggcaatttatgcaacatcaacttacgcccaatcagcccccggtcaacacactggttatgaatattcccgtagtggcaacccaactcgtgatgctctggaaagcgcgatcgccgaactggaaaacggtagccgaggctacgcttttagttcagggctcgctgccagttccacggtgctagaactcttggataaggatagccatttggtggcagtcgatgatctgtacggtggtacctaccggctactcgaaaaagtacgtagccgcaccgccggtttgcgtgtcacttacgtggaagccaatgatatttccggccttgaagcagccattcgtcccgatacaaaaatgatttgggtggagactcctaccaatccgttgctgaaactggccgatctgacggctatcgcacaaatagcgcaacgtcacagtattattagtgttgcagataacactttcgcttcaccatatctccaacgcccagttgatttgggatttgatatcgtcgtgcactccgccactaaatatttaaacggccactctgatgtgatcgcaggactggccgtcgtcggaaaaaatgcagaactagcagaaaaacttggttttctgcaaaactctgtcggtggcgtgctcgatccctttagtagtttcctggtgctgcgcggaatgcggacacttgccctacgtatgcagcgccacattgatagtgcatcaaagatcgcacattggttggagcaacaacctcagatcgaaaccgttttctatcccggtctcgcttcccatccacagcatgaattggcgaagcgtcaaatgaaaggctttggtggtatgatttctgttcacttaaaaggtgatgatgattatgcccgccggttaattcaagagctaaaactatttaccctggcagaaagtctgggcggggtggagagcctgatcagccaaccattcagtatgactcacgcgtctattccattagaaaaacgccttgcttctgggatcacgccacagttggtacgcatttctgtgggtatagaggatgcagaggatcttatcgccgatttggctcaagcgttagaaaaagccgctcaataaaagaataatgccagccaattttttcaactggctggcatttaaataaaaacggctctttttatgcaatcaacagcaaatgtagaaccggaattatttatcacccaacagaacggattccagtgcgatttcaatcatttcattgaaagtcgtctggcgttcctcggcggtcagtttttcatgagtgcggatgtgatcagaaacggtacagatagtcagtgcttttgcgccatattcagccgcaacaccgtaaaaacccgcagcttccatttctacgcccaaaatgccatatttttccatgatatcgaacagttgtggatcaggtgtatagaacagttcaaccgagaagatgttacctacacgcacattgatgttttttgctttagccgcgtcaacagcattacggaccagatcgaaatcagcaatcgccgcaaaatcgtgatctttaaagcgtatacggttaactttggaatcagtacatgcccccatgccaataacgacatcacgcaatttaacatcgtgacgtactgaaccacaggaacctacacggataagaactttagcaccgaaatcggtgataagctctttcgcatagatagagcaggatggaatacccataccatgccccatcacagaaattgggcggcctttataagtaccagtaaaccccaacataccgcgtacatcgtttacctgccgcacattctccagaaaagtttcagcaatatatttcgcacgtaatggatcgcctggcatcagaacaacgtctgcaaaatcacccatctcagcattaatatgaggcgtggccataattaaattccttatttttttatttaatggttattttagtgatatatggctgcctaaaagaaaagcagccaaataagtggggtcagagcattgatttgccatattccattggcgacagttcaaaatatttagcgactgtctgtccaatatcagcaaaagtttcacggtgacccaatgaaccaggttgcacttttggtccataaatcagcaccggaatgtgctcacgtgtgtggtcagtaccagaccaggttggatcacaaccgtggtcggcggtcaggattaaaatgtcatcatttttcacccgcttcagcatttcaggcagacgacggtcaaacagttccaatgccgccgcataacccggaacatcacgacgatgaccataagaagagtcgaaatcgacaaagttagtgaatacgatggtgttgtcacccgctttttccatttccaccagcgttgcatcaaacaatgcatcaatgccggtcgctttcactttttgcgtaatgccgacgtttgcatagatatcggcaattttaccgatagaaacgacttcgccatttttctcatcgactaattttttcagtatggtgggagcaggtggctctaccgctaaatcatggcgattaccggtacgctggaagttacccgctttgtctccaacaaacggacgcgcaatcacccggccaatgttgtaaccgccatcagtcaattcttcacgggcgatttcacatagctcatacagacgatctaaaccgaatgtctcttcgtggcaagcaatctggaataccgaatcagcagaagtatagaaaatcggtttacccgttttcatatgctcttcacccagtttatccagaataaccgtaccagaagagtggcagttaccgagataacctggcagatttgcgcgttctaccagtttatccaacaatgcctgcggaaagctgttttcttcatctttgaagtaaccccagtcaaacagcaccgggacaccggcaatttcccaatgacctgacggtgtatctttaccggaagagagttcactggcgtaagcgtaagcaccaataatgtccgcgtctttatccaagccggcagggaaagttccacaggactcctcagtcgctttccccaaacctaaacggcttaagttcggcaaatacagaggccctttgcgaccgatatccgcatcaccacgggcacacgcttctgcaatgtgccccaaggtgttagatccttgatcaccaaatttttcggcatctttactggcaccaatgccaaaagaatccaataccatgatgaatgtacgtttcataattttctcctgcgtcaaatcacgctatacccgttatctttcaaattgcctctttgttggctgcactcactcaccccggttacatcgttcgctatgctcccggggattcactcccttgccgtcgcgatccatcttaaaatccatagggtattaatcatgattaaagccgttacgcgccgactgatgcggtgagcgattatcaataatggctgctttgtttttgcccctgatgacccagagtatttagcaaattgcctaacaagctagaagccccaaaacgaaaatgacgggcatcaacccatttgtcacccatgatatgatcagctaatgccagatattgtgcagcctcttcagcggtacgcacgccaccagccggtttgaagccaaccgtttcacccacgcccatctcatgaatcaccttcatcatgatttcagcacttgccaatgtcgcgttaaccggcactttacctgtagatgttttgataaaatcggcacccgcgttgattgaaatttcagatgccttacggatcagagatgcctctttcagttcaccagtttcaataataacttttagcagcacatccgcttctgcacaggcgactttacacgcttttaccatctcaaaaccgacttgttcattactggccatcaatgcacggtatgggaaaaccacatcgacctcatcagcgccataagcaatagccgcttgggtttcagctaaagcgatgtcaatatcgtcatgaccatgtgggaagtttgtcactgttgcaatgcggatttcaggtgtgccctgttcacgtaatactttacgtgccagaggaataaaacgagggtagatacagatagccgcagtattgcccgcgaggcttttcgcctgatgacaaagtgccgtcactttttcatcggtatcattatcattgagtgtcgttaaatccatcaaactcagcgcacgctgcgctgctgcggttaaatcggtcataaaactctccaacgttattatcgcggctagcttctgctagattatcaccaaataatacacgacaaaaaatatataccctatggatttcaagatgcattacggcggcaagggagcgaatccccgggagcatagataacgatgtgaccggggtgagtgagtgcagccaacaaagaggcaacttgaaagatgacgggtataactcacgtccaacaaacaatagagtataaagagtataaagacgctgcttcttcatcacgaattaaagataaaccggtaggacgatagattgcaggcgggattatcccacctgcctaatttcagcaacgttacagagccaggaagaagcctgcgatagttgcactcattaagttggataatgtgcccgcgataatggctttcattcccaaacgagcaacatctccgcggcggttcggtgccataccgcccagcccccctagcaggatagcaacggaagcaaggttagcaaagccacacaatgcgaaggagataattgctttagtatgatctgatagaacctgcaaacccgccgccataaccacatcatccggtttcaaataggcaccgaaattcataaaagcaacaaattcgttcacaactattttttgaccgatgaaagaacctgctaccgttgcttcattccacggaacaccaatcaggtaagcaattggcgcgaagacccaccccaacaccagttcaagagaaagttgtggataattaaaccaaccaccgattccaccgagaataccattcaacaatgcaatcagggcaacaaacgccaataacattgccccgacgttcaatgccaattgcataccagaagcagcaccagaggcggctgcatcaataatgttagcaggacgttcctcttcagcgaccagtgacattgcatcaacagtatcgcgtggcttttcagtttcaggcaccatcaatttcgcgaacaacaggccacctggtgccgccataaaggaagccgcaatcagatattccaaaggaacacccattgatgcataacccgccagtactgaacccgcaacggatgccagaccaccactcattaccgcaaacagttcagattgagtcatagtcgcaatataagggcgaacaaccagtggtgcctcagtttggcccacgaaaatattcgctgtcgcagacaaagattctgtacgtgaagttccgagaatcttttgcagccccccccccaagactttgataactagctgcataacaccaatgtagtacaacacagcaatcaatgaagagaagaaaacaataataggcagtacacgcagggcgaaaacaaatcccccaccaccaaacagttcaaacattttgggggaaactaatccaccaaaaataaaatccattccttgttgaccaaactggataacactagaaactccctcagacatacccattaatattttcttacctgcgggaacataaagtacaaaagcaccgatagcgatctgaatcaaaaaggcaccaaggacagtacggagtttaatagcgcgataattactggaaaagagtactgcgatcaaaatcagcactaccatcccgaccaagctcataaagagttgcattggaagaatccctgttcacttaataataaattaaatatgccagttgaacgtaaatcgttcactgacgatgagtcggcgctgattatactcagtcatcggaatgaacaagctattgacatcacaaatatctactgaaaaaagcaataaaaaaatgataaatgtgatgtgaatcacacaaatttgcggaaataatcttcaatagataatctaatctcggaatggcaaaataatcaacaattaagaaataattatcaggtaagcacagctaaaggacagaagatagaagatatgaagacatattatatgaaaataatgaaagccaatatgctagaagaacgcttgagagaatttttgaaacatcgactcgctcactctaatgataatgctcatgatattgggcatctgatccgtgttgcaaataacgcgaaaagaatcatggagaaagaaggaggtgagcctttaattatcattgcctcaagttacttacatgacattgtgtcattaccaaaagatcatccagaaaaaaaacagtcttcaaaacttgcagcacaggaagccgtaaaaattctatctattgaatttccagagttcccaaaagaactttatgatgcggtagaacacgccattataacccatagctacagcgcaaacttacctgccaaaacaatagaagctaaaatactccaagatgcagaccgattggatgcattaggagctattggactcgccagagtattttatatagcgggtatgctcggtcaggggctttttcatcatgatgatccctttgcacttaatcgccccttggatgacaaatcctatacaatcgatcactttcagacaaagttatttaaactccccgaaaaaatgaataccacagagggtaagaagattgcacaattgaatgcccaatatttggttgactttttgagcaaactgtcgagcgaaattaaaggtgatttaattaatacggatgaatttataaaggattttttcaaggaaaattaattgcaaatattataaccttggagctttaccaatagtcgttaaaatcactctgtaactgcctatcccaatagagctattttatttgcccttctttgccataaagagcgaacctgggcagtgctcaaaatcctcacgtactacgtgtacgctccggtttttccgcgctgtccgtgttcactgttcattgataagaatggtctgcaacaattacgcctattgagataggctctaaatcatataattaatccaaataactcaacactgttatgataaagttggcgagcaatctcatcaggagcttcgcggcggagctcacataacgaagcaaaaactccagcaattttttccggccggttaggttctccctgaaaaccgaaaagcggcatatctggagcatcggtttccagcaccagagacgttaacgggagttcagccattacgcgacgtgttttctgcgctctttcataagtaatggttccccctaccccaaggtaatatcccaaaccgataaaagcctccgcctgcgataagctacccgcaaatccgtgtactacaccggtacggtgaaggttgattcttcttaggatcgctgccagttgatcatggctttttcgggaatgaaggataaccggcagttcatactgttttgctaaccgcaattgatcgcataacaacgctttctgtttttcaaattggggttcagtcatatagagatcaagcccaatctccccaaccgccaccaacttttcgtgtttctgtttcagaaacgattccaaatccgcaagatgcgcttcctgatgttgatcgatataaagaggatgtaaacccaatgcagcataaattgcaggataagaacaagccaattcagatacctgttgcaaatttgcactactaatagcggggacaataattctatccacaccaacctgtgccgcccgttgcaggctctgctgttcatcatcacgaaacggagggaaatcaaaatggcagtgagtatcaataaacatgaaactatccgttatttatctgttctgacgatagaaaaattgagggcatactgaatatcaataccatttttgacggaaactgtgtagatatctatgccgataaggcgaggagccatcacccggtaaaagaccagaaatgccccgatcaattcaagtctgattattttcagtctgaaactgttacgaggtttctttaccgctatgattaaattaattttttattcctacattaataaaaattaagcttaacataataagctttcacgctataaagtcattcctccatcagttaacactcttaccaaatagtgaaaatgattctaaatacctaagatagatattgattgcgggtaatccagatcaagccgccgcttcaatagttgtaccactaaaactcacttattactcacactatcatgttttaaatagtggcaaactcaggtcaccgtttcccgtgatgaagtgatccgctatttcgatcaattaaatgctaaagatatgacggctgaaaatgcagcttcacttatcgccacattgcatgagatggataaaggtacgataacgcaagtgaataccttgctattaggagaaaataactggccgaaaagttttacatcactttggcaacgtctgacctggttacgtgtcggacaaagtttgaatgtcggtagtaccactctgagcaacctagatagccgttttttgccttttgaaggtcgaaaagcaacaaccggtacactggagctcaatattttccatgccggtaaagaaagaacgcaacgtgggctagttgccaatctgagtgacatcattgtgcatctgaattacatcattcgagacgcataaattttttttctttgtcgatcacaggtccctccctattaggggcctgttattaaggagtacttttatgcaggattcaccagaagtatcgattacaacgctgtcacttcccaaaggtggcggagctatcaatggcatgggagaagcgctaagtgctgccggccctgatggaatggccactctatctctgccgttgcccctttcgactggcagagggactgcgcctggattatcgctgctttacagcagtagtgcaggtaacgggcctttcggtatcggctggcaatgtggcgtcatgactattagccgacgcacccaacatggcattccacaatacggtaatgacgacacgttcttatctccacaaggcgaagtcatgaatattgccctaaataaccaagggcaaccagatatccgtcaagacgttaagacgctgcaaggcgtgaccttgccaatctcctataccgtgacccgctatcaagcccgccagatcgtggatttcagcagaatcgaatactggcaaccggcctccggtcaagaaggacgcgctttctggctgatatcgtcaccggacggccaactgcacatcttagggaaaaccgcacaggcttgtctggcaaatccgcaaaatgatcaacaaatcgcccagtggttgctggaagaaaccgtgacaccaaccggtgaacatgtcagttatcaataccgagccgaagatgaaacccattgtgacgacaatgaaaaaaccgctcaccccaatgctaccgcacagcgctatctggtacaggtgaactacggtaacatcaaaccgcaaaccagcctgttcgtactggataacacacctccgacaccggaagagtggctgtttcatctggtctttgaccacggtgaacgcgatacgtcacttcataccgtgccgaaatgggatgcaggtacagcacaatggcctgtacgccaggatatcttctctcgctatgaatacggttttgaagtacgtactcgccgcttatgccaacaagtactgatgtttcaccgtaccgcgctcatggccggagaagccggtaccagtgacgccccggaactggttggacgcttaatactggattacgatagaaatgccagcgtcaccacattgattgccgcccgccaattgagtcacgaaccggatggcagcccaatcactctgccaccattagagttggcctggcagcggttcaacctagagaagatgccaacatggcaacgttttgatgcactagataattttaactcgcagcaacgttatcaattggttgatctgcgaggagaagggttgccgggtatgctgtaccaagatcgcggtgcttggtggtataaagcgccgcaacgtcaggaagacggggatagtaatgccgtcacttacgacaaaatcgccccactgcctaccctacccagtttgcaggataatgcctcattgatggatatcaacggagacggccaactggattgggtaatcaccgcctccggtattcgcggataccatagccagcaacccgatggaaaatggacgcactttacgccaatcaatgccttgccagtagaatattttcacccaagcatccagttcgctgaccttaccggggcaggcttatccgatttagtgttgatcgggccgaaaagcgtgcgtctgtacgccaaccagcgaaacggctggcgtaaaggacaagatgtcccccaatccacaggtatcactctgccggttactggaaccgacgcccgcaaactggtggctttcagcgatatgctcggttccggtcaacagcacctagtggaaatcagggctaatcgcgtcacttgttggcctaatctgggacatggccgtttcggtcaaccactgaccctgccaggatttaaccagcccgaaactagcttcaatcccgaacggctgtttttggcggatatcgacggctccggcaccactgacattatctatgcgcaatccggctctttgctcatttatctcaaccaaagtggtaatcaatttgatgccccgctgacgttagctttgccagaaggtgtacaatttgacaatacttgccaactccaagtcgctgatattcaagggctagggatagccagtctgatcctgacagtgccacatatggcaccacatcactggcgttgcgatttgtcgctaaccaaaccttggttgctaaatgtgatgaacaataaccggggtgcacatcacactctacattatcgtagctccgcgcaattctggttggatgagaaattacaactcaccaaagcaggcaaatctccagcttgttacctgccgtttccaatgcatctgctgtggcataccgaaattcaggatgaaatcagcggtaaccggctcacgagtgcagtcagctacagccacggtgtttgggatggtaaagagcgggaattcagaggatttggttgcgtcaaacagacagataccacaacattttctcacggcaccgcccccgaacaggcggcaccgtcattgagcattagctggtttgccaccgggatagatgacgtagacagccaattagccacagaatattggcaggcagatactcaggcttatagcggatttgaaacccgttataccgtctgggataacgctaaccagacagatcaagcattcacccccaatgagacacaacgtaactggctgacgcgggcacttaaaggccaactgctacgcaccgagctctacggtctggacggaacggacagtcaaacggtgccttataccgtcagtgaatcacgctatcaggtacgctctattcccgtagagaaagaaaccgaattatctgcctgggtgactgccattgaaaatcgcagctaccactatgaacgtatcatcagtgatccacagctcagccagagtatccgactgcaacacgatatctttggtcaatcactgcaaagtgtcgatattgcctggccacgccgcgaaaaaccggcggtaaatccctacccacctaccctgccggaagcactattcgacagtagctatgatgaccagcaacaacgattacgtctggtgaggcaaaaaaatagctggcatcacctgactgacggagaaaactggcgattaggtttaccaaatgcacaacgccgtgatgtttatacttatgaccggaccaaaattccaaccgaagggatctctcttgaagtcttgctgaaagccgatggcctactagcagatgaaaaagcagccgtttatctggggcaacaacagacgttttacaccgccggtcaatcggaagtcacactagaaaagcccacgttacaggcgctggtagcgtttcaagaaaccgccatgatggacgatacctcattacaggcgtatgaaggggtgattgaagaacaggggttgaataccacactgacacaggccggttatcagcaagtcgcgcggttatttaataccggatcagaaagcccagtatgggtggcacggcaaggctataccgattaccgtgatgccacccagttctggcggcctcagactcagcgtaactcgttactaacagggaaaaccactctgacctgggatacccatcattgcgtaataattcagactcaggatgccgctggattaacgacgcaagcccgttacgattatcgtttccttacgccggtacaactgacagatattaatgataatcaacatattgtgacactggacgcgctaggtcgcgtgaccaccagccggttctggggtacggaggcaggacaagccacaggctattctaatcagccctttacaccaccggattccgtagataaagcgctagcgttaacaggagtactccccgttgcccaatgtttagtctatgccgttgatagctggatgccgttgttatctttgtctcagctttctcagtcaccagaagaggcagaagcgctatgggcgcaactgcgtgccgctcatatggttaccgaagatgggaaagtgtgcgcgctaggcgggaaacggggaataggccagcagaacctcacgattcaactcatctcgctattggcaagtattccccgtttacctccacatgtactggggatcaccactgatcgctacgataacgatccgcaacaacagcaccaacagaccgtgagttttagtgacggttttggccggttactccagagttcagtccgtcacgagcccggtgatgcctggcaacgtaaagaggacggtgggctggttgtggatgcaaatggtgctctggtcagtgccgctacagacacccgatgggccgtttccggtcgcacagaatatgacgataaaggccaaccggtacgtacttatcaaccctattttctgaataactggcgctacgttagtgatgacagcgcacgagatgacctgtttgccgatacccacctttatgatccactgggacgggaatacaaggtcatcaccgctaagaaatatttgcgagaaaaacagtacactccgtggtttatcgtcagtgaggatgaaaacgataccgcatcaagaaccccatagttttacctatttttatctgttgccccgcggtatattgcggggcagtatctatcaactttgaaaatttagcatttccgataagttccaccgttttgataatgcaaatcacctttaaaggaaacccacatatatacccgtcatctttcaagttgcctctttgttggctgcactcactcaccccggtcacatcgttatctatgctcccggggattcgttcccttgccgtcgcgatgcatcttgcaatccatagggtatatacttgcagaattaaaaatgaaatatcaacgtcaatgttatttcttaataaaagccggaacaggatcaggtgtcgggacagaactatcacaattataatgctctcctgtcagccctatttttttgcaagctgtagacaaaagatcattaggtgttgcccactcatctttccagttactaccgtcataacgttcattcttaaatagatcccacattatcagacccgttttaccatatttgatcgtaccatctaatatgctgttaagagcgctcttcgtcagcggtaaattaccggttgcgggtctaccaacttcaaatccaacggtaatcggcggcaaaaccaataatttttgcggttgaactgatgcctgagcgtaattacgtgcccctttcagtttgatatgaaaggtaacaacttcattgcccgatttaagccaattaatatattgcccataataatacttaacctgtccaggaaggtcacaaggaatatatgtttcacctcctccaataaatccacaatctttttcacttaaatcataggtcatcacaccaatataactgagtcggttgatcagactgggataactcagcgcggtattataaattaaaccatagagatttcctccccaccaagcaccaccataaatatcactattcctcgcattggttccccaattagcggacatattcgggatacctcccgttgcaggacctgcaatacttagcttaagtgatggtttaacggcattaattgaagtgtaaaaagattttaaaatagcggcgaatttatccacggttgcaggcattgcacggggaattttttctgcgccaggaacaatcttcattgacgcatcataaacataaccgccgagtccctttgctattaaagttgatgtaataagagtttcactgttattaaggggaaccttgattgagtcaggcgttaatttccagctttttgcattaatatcagcgtgccagaattcttcataatccacatcaattccctcgactcccaagttagcagccaaattgacaatatttctatatgccttatctgctgctttacccgtaatagtactgtcaaatcgaggaattttagtcaggggattagggaagatgtcataaaccgcaccgggttcattaccacaagcatcttttttgctggcagttatatcataaatttttggatcacaactaaagttccatccacctactgcaatataagtgctcacaccatgagattttaaatcagcaatcacaccttttaatgccataaaatcagctctagcattttcagcttctttgatgctaatactttgaccagaagtacaggtataaccaaacaatcctgaacatttcaggctatttttttcataattaacaaaaccaggctggacgaaagacaataccaacgtattaaagttactcttgttcttagagatatctctacttaattttttaaaattatcaaggctggcataatattcttgagtatccacctgtgcagcaggcccactcagataatatgcagatattttagggttggcggcaataacatttcctgatgtgaaaaaacataatatagaactcgctaataaatatcggtttaatttgtatttagacatatatctatctccacttggttaacattacttttccgattacagccaatgagttatcatgacgcctcattgccttttcatcatgaacggtataagtttttccctaatagagcgttaatatgctcagtctgttattatagactgtgatgtagttactgaactgttatatccgttatctttcaagttgcctctttgttggctgcactcccttgccgtcgcgattcatcttgaaatccatagggtatatatcagcattaattatttcaatgcaccaatttcataatagtatagttttcaccattgtccacaaaagagatagaaattagttgtaataatatttctctctaatctatctaaataaaaaacaatagggtatatgtgataattcctctagattatacctatgttaattaattaccgcttgtgcaaacctgcctatgaatgaacagtgaatacgaacaccggagtatacatgtcaatagaaaacccaccgctttaaataaacgccctctgttatcaggcaaattatgcccaaaaacttcaacgattcttcaacgaattataaaaaactataaaaaagcattatcttaaattgctgaattaatgatcaggcccgtatactcactgtgcgttaaaacaaatctggaatagcaagtagcttactgagtcgcgcaaaatgtattccagcaagtgaaacaaagttaaaacacaggaaaattatcatgacacgtttaggcttatccataactgtattatcactgttattctctggcgcggtattggctgcacctagcacacccgccccccaatcttcgaataccaaggcgacgtcttcccatatggaaaataccaaagcagagaagaaatctggcaaaaccgcccccaaacaacgctcacaccagaaggcaaaaagcaaagaagccaagaagaaggctcactgagttttccggcctaaaactactatttatgtccgcaattatgtccgcaatcgttatgacacaagtttagtcgtatcataactgtaaattcaggggggaaatccccccctcaacaggctatcgtgaaaagcttaacaagccccttcagtatcttcatcaccataatatttaacaccaatcctgatgatatcccgtccctgagatttacggtgtttattcgtgtcacgcaatgaatagatacaaccacaatattcctgctgataaaatctttcctgtttactaatttcaatcatccgagctgaaccaccttgtttacgccagttgtaatcccagtattgaatccccggatactgacttgccgctcgttttccacaatcatttatctgctgcatgtttttccagcgggaaatgcccaatgagcttgaaataatgctgaaattattttcataagcatacaaagcagtacgctcaaaacgcatatcaaagcacatggtgcagcgaacacctctttctggctccaattccatgcctttagcacgttcaaaccagttatcgctgtcataatccgcatcgacaaatggcacattgtgttgctccgcaaaacgaatgttctcttctttgcgaattaaatattcccgtttgggatgaatattcggattatagaaaaagacggtgtaatcaattccagaagcacgtagcgcttccatcacttcaccagaacaaggagcacaacaagagtgcaataataatcgttccgcattatccggtaacgttaaaacagggcgaacatagttttccatttagcaggctccatataattataagaattgattatagaatatagttatttttagcttcaaatttttcgaatgaaattcatcatgacttatttgcccttacgatccttaccttttcgatcacagtaaattacttgaaattctggcaggttctaccgtcatattgtcgtcatcaaagtttgtacgaggaagttcactaccgataaatctgttttacgctgatagttaactaaattatagccaaattcagatgcttttaaccaaaacaatttaaatggagaccaccatgcgccatacaatttctctgcgtgacctctcttttccggcaatcaccgccggatttgtcgctgttttagttggatataccagttcagcggcaattatctttcaggctgcggaagctgcgggcgccaccaccctacagatcggcggctggctgagtatgctagggcttgggatgggtatcagctccctggggctatcgctttattaccgcacccccgtccttaccgcatggtcaacaccgggcgcggcgctactggcgacaacgctaccaggaacatcaattaatgaagccattggtatctttatctttgcttcagcactgatcttgctgtgcggtattactggcctgtttgctcgattgatgaactatatcccacaggcactttccgccgctatgttagccggtattctattacgctttggtttagatgccttttcctcattttcagtcaacttcgtactgactgccggaatgtgtttaacttatcttctggcacgcagatatttatcccgctatgccatcatcttaacactattatcggggctgattatcgccgctttacagggaggtattcactttgaacaacaatccacagtcgcatttgttgcccctgaatttattgcgcccagtttcacactctcttcgttattgagtgtcggtattccatttttcatcgtcacgatggcatcccaaaacgcacccggcgtagccacactgaaagccgcagggtatccagtttctgtttcatcactgataagctggactgcgctcatttcactgatcttgtcaccttttggtggtttttccgtctgtattgccgccattacggcagcaatttgtatgagcccagaaatccacactgacccaaatcgccgctatatggccgctgccgtagcgggcgtgttttacctgatagcagggctgttcggtggttcaatcagtatgttattcagcgcgctaccggcagcacttattcatattattgccggattagcattgcttggaacaatttccggcagcctgctacaaacgctacagaatgaaaaacaacgggacgctgcggtaataacatttttaatcaccgcatctggcgtaacattacttggtgtaggcgctgcattctggggattaataggtggcgtaataaccatgctccttttatctttgcctgagaaaaacagaatagttcattagatgaacagtaaaattatacttttcagcactttatgatacttattatcaataaaacttatgatagtttgccgggtctgttgcgctttaaatattacgataggacatatctaacaaccttaaatcttcttacccgcaaaaccgagctttctattatgaaattttttgatatgaaattttctgatattagcaagttagctgttatttcatcctgcctggcaatcccttatagctatgctgatgatcgcccaattctttctctctctgttagccagtccggcggaaaccaaacgactgctgatggtagtttatccagaaaaccaaataagcaagaatcacgaatactcccaatttggggtgacgaggccagagctaaaggttatgacctaccggaaccttttggtgccagttacggttatatgaatatgcggcagaatatcattgtagacgatattaaaatcattataccgaataccccaggttttgaagatgtgctggatatccagacaggtaaaaccagagaaaagaatgagtcgcatatgctcaaactagatgcctgggttctaccttttctgaatgtttatggcgtttatggttggacaaaaggatcatcgaaaaccaacattgagggaatcagatttagtggtttccctattcctgatatgaaagatattcctttcaaattggactttaaaggtaaaacctatggtggcggttttactctagcaggaggttacgatcagtttttcggtacacttgatactaactatacctacactaatctagatattctggatggtaaaattagcgctctggttgttacaccacgtgttggttatgagtttatattccagccaatcatcccaggccaaggaaataccaaattgcaggtatggaccggtggtatgtaccagaaaattactcagaaatttgagggaaatattagtaatctggatttaccccccatgtttgataaattagtaagtgcattcgacgattatgaaagtatgaaattcaaagtaaaacagcatgttgcatcccgctggaataataccgttggtgcaaggctggaagtcacccgcaatttcaatctgctgactgaagttggctttaacaaacgtaatagctgctatatttcgggagagtttcgcttttaatgaatatccgctgtactttatatgggctggctttagtcagcctttttatttctgatttctcatatggcgaagcacgactcagcaggggaaaaatcgatggctggctagaaaaattaggtggcagtaatacctatgacagcagtaaagcgattgactggggcattttacccggccctttctacactccagagttaggtgctggtctcggtgttgctgtcattggtctctatcggccagataataatgatcataccagccaaatctcttctctttccctgaatggatttgcctcttcaacaggtgcctttggcttcacatttgataactacaatttctttgctgatgatcaatggcgtttttttctttccggtacattgaacaacgttcccacctactactggggtacaggatatcaagcaggtaagacagatgatcgcaaagaaaaatatcactcacaggaactgcacttgcaacccagagttctctatcgagttgctgattctacctatttaggcgctggctggaatttttcatcattacatgccaaagaccctgataacggtgctaaaaaactttttgcagcagaaaacgatggccggtccatattgagttcaggcgtcagtgcctatttcagctatgacactcgggattttctgcctaacgctcatcaaggacacgttcttgatattacctatacccatttttccccggcattaggcagtgaccgccggtttaataccgttgatatgcaatacagcacctattatcaattagatgaaaaatctgtactggcattcgatagttatggtcgtttcactgacggccaagtgccctggaatatgctgtcaatgctaggtaatagtcatcggatgcgcggatattatgaaggcagataccgggacaaaaatgttatcagcacccaattggaatatcggcacaaattggactggcgacatggctttgttctatgggctggggcgggcactctaagccattatgcaaaagatattggctcagaaaactggttacccaccgttggcgcaggctatcgttttgaattcaaacctaaaatgaatgtcaggctggattttggtatcggtaaaaaaagcaatggattttattttcaggtaggagaggcgttttgaaattgcgtttatggattactgctttaacgttagtcgcaggatgccaaggaactttttcttcaatcgcaccagtacaacctgacttaaatagtgaaacaaccgccgaagccacccgtgcatggccggttcttgctccgattccctctcccgaaggattaagagcttgctgtgcttttggctacaatttaaaaactgaattactgaccattccagtacctttttaccacataagtaatgtgctggatgccgataatcttggggcacataattataacaacagtttttttggtaccgttgcttcattaacagggctcagtaatgaaaaagtggggatgatatatacccgccgaggcggattcattgatatttcccatgtacgggataccgctgataatgcggtttttctgttcagtcaaatctggcctcgtcttggagaagagtggcaaatagaactcagcagcgaattagcattacgccgtatccaattctatcaattcacaccaccagcatcgatagaacaacgttataccttaactgcttatctagccgcaaaattggcttttgaacttgctgcatggcatgaaatcgcccaatggtacggttatcagtctgtaccgggattttctgaaaaagtatctgcgttctctcctgaagatctctactccaatctattaggcgctcgtctttccctctctttgatactggctgggcaagtaccgtcaatgaaacagtaccgtctatcaatgcaagctattctgcctcctgcactacgtgaactagaagccttatcccctgatgaaacacggaaaatgtttgaacaggttgatggtatctggtgggacagcaaacgtcgcgtgcctgataaacgtttaatccttcaacgtgatttccatactcacagcgatcgtacccctaatatggtgcctacagaacagcaagttccactcagacttaccctgccacaacaatatactggctacagattatctgaattggccgaattacaattgtggcctagccgccaaatgaaagatcttcctgtaccagaaagttattggattgctcttgattttccacaattggcagaaaaagcaaaagaacaacaagagaatcattgatgcatatattttctatgaaagaatgtatataacattatgagttaaaatatatgagagattttagattactatttctcaaacaataattcctttgtaatatcatcaattataatttactatttccataatgttacatcataatataaactcaacatcatctataataaaactaaactatgcccaccctacttaaattaatctataaagagaaagcctacatcaataaggaattatttcacaggataaaaaaatcgtattgaaatatttacaaagataaaacaccaataaacaactgatataaaataattaatattacataacatctaaaaaaacaaattaaaaaatcataagaatattaaccagcacaacaacaaaaaaagaaacaaaatatcaaaaagatcacaaaaacaagaatataattcttaattacactctcaatctgtgtattacacttatttttatcgaaaaattagactttcactcttaatttaacctaaataataaaaatcccttcttaaataggtttaatcgtctataatatacgtttccaagttataaatatgtataaacaatatcagctttatctaagtagataaaataagaacttgcattggcaacaattagatttattcaactaaaactcaagttactaaactattttcgaccatataatatattgatttttattttaaatttataatattaaatcaatttaatagataaatactcatattgtttttttaatttttctgatgtattgggggattcagggcccctatcttcacccccctgataaagccaattaagatgtccctactcctggagaggaaaaatgaataaactagcgttatcaaccaccgctgcgcttatttttgctacgggttctgctgttgcagccaatgatgctgccggcggtacattacatttctctggtgcagtcactgatgccacttgtactattaatggtggtgcttcagctaatctgtcgattatattggaaccgatctcagtcactcaagccggacaaaaagaaggcttaattgattttggtaagaaagcattttcactagaattttctaactgccagtccaaagccgttggttttgatccagcaacctctatgttgaaaatccagttctcatcatcacatactatttctaacgatgctaagtacctggttaaccaagaacttaatgcaaatggtaagccgaaaaacgtaggtatcgcgattgttaaacacgccgaagaaaataaccctattatgctgaataaagcgtttgatacaggaatcaaaggctctgagacaatacctgaagttgtcgatttctatgcgaaatattacaaagtaggcgctggtgatgcagatcacggtaaaatagtaacaatggttacttatcacgttacttatttataatgatttactacaataaataaagcctatttagataaataggcttatttaatttggcaaaaataacgttatgaagaaattatttttaactatattattagggataacgactttatctgctcatgctaacatcgttattaacacaacacgtgttatttacccagccagtaataaagaggtatcagttcaattattaaatgcaggggatcaaccctctctggtacaatcctggatagatgatggcgatcctaattcaacacctgaaacagctaaagtcccctttttactcacccctccagtcgtcaaaattgatggcaataacgggcaacaattaagaattaaatacatcagtaacaatctacccacggatcgtgaatcgctgttttatttaaatgttctggatattcctcccgttgcagaaaatattagtgataaaaacgttatgcaaatcgcaattcgtacccggatcaaatttttctaccggcctgataagctttctatcttacctaaacagatccaacaacatattgtattaaaacgtgagggtagccaactaaaattggaaaatgcatcaccctatttcatgagtattgtcggccttaaatcttctgacactcaacctaacttactcaatgaaggaacaattataaaaccgttctcttctcattcattcagtaccaatgaaaaagtaaaagttggagacaaattaactctggctattgttgatgattttggtgctataaataaattaactttaccacttcaatagtgatattactggcatagcatagaacatgataagacaaaaaattagtccgttagctctgataataagtacccttctgtatacagattgtttatgctatgccacaacatttaatactgactttctggttggtgaatcggcaaaagcggatttatcccgattttattccacttcagagctacccgctggtcgttatggtattgacatatatctgaataatgactggaaaggaagatttgatattaatatccagaacgatggcaaagatatttacttacttaatgaagatcttcccaggttaggtataaaaattgataaaaaccaattaccagaatcgaatttatccaaagatgaaattcttcttactaaaataatacatgaaggaaccgctaatctcgatgttcctaaactcagcctgcatctggtcgtcccgcaggcatatatcaaaaacgagctaaaaggctatatcgatcctgcgttctgggacagaggtatccccggcgctatgctgtcctacaatgccaactattaccatactcagaataggaataaacaaaaccgcgaccgtgaagatgaagataatgcttacgtgtcacttaatagcggtttgaatctatttggctggcaattacgtgatcaatcctcttatcactatacgcgttcaaatggtgataaatggagtaacaatacccgttatctgcaacgaggaatttcatcaattaattcagaatttcgcattggtgacagctatacatcaagcgatttattcgactctttccgcttccgaggtatcaatttgaaaaccgatatgcgcatgtaccccgatgcctggcaagggttttcccctatcgttcggggagttgcgcagactaatgctctggtaaaaatcacccaaaataatgttgttatttatcaaggtaatgtaccacccgggccgtttgctattgatactattttacccacaggttcaggtagtgatttgctagttgcagtgacggaagcagacgggcgtactaacagttttaccgttcccttttcatccgttcctaatatgatgaaagaaggtcttggcaaatatgatatcagtgcaggtaaaacacatattgccaacagtcgttataaaccaaacttttttcaagccagctatcaatatggttttaataatgtcctgaccggttatacaggtaccattatcagtaaagattattactcactactgctaggtagtggctttaatctacccattggcgctgtctcaattgacgtttcacagtccagcgccaaatttgataatagcccaaccatgaaagggcaaagctacaaattggcttatagccgttatatcccacaaacaaaaacaaatttctcgctggcggcttatcgttattcaactaaaaattatctcaccctaatcgatgcgattgatctgcatgactggataagcaatggatataaccaacaatattattctcatcaaaaaaatacctttaatatcaatttgaaccagaatcttggtagtcgtgcaggttcactttttctttcgggaacatttcgtaattactggggaacccagaataaaagtagagaatatcaaatggggtattccaatagtctggggaaaatcaattattccctgacagcaagccgtgtccgatacaatatcaatgaaacagaaagtaaagaggaacagcgctattatctgatgctgtctgttccttttgagttgtttggctaccctgcctatttgaccaataatgtctcaatcaatgaaagtcactatgacaacagtaacttaggattaagcggcagcgcaggcccaaacaaccgtttgaattaccacttcaacatttcagatcagaaaagtggttcgacaacaaccagtgcaaatttgacctacaaaacatccgtttccacactgagtagttcttatagccaatccaaggagtaccgccaaatgggacttggcgcaaccggcagtttagttgcttatcgaggcggaattctggcggctaatcaaattggggaaactttcgccatcattgacgcaccgggcacagcaaacgcttctgtgaatggtgataaaagcatggtgacaaacaccagcggtaagttgctgataccttatctttctccttatcgtaaaaatgccatcatgctagataccagtgaagtgccagaaggggccgctgaacttatcggtaacatcagagatgtcgcgccatattccggcgcgattacccatatcggatttaaaacagaccagcggaagacttttatcttctactccgctcaggctgatggtaaacctttacctttcggtactgaaattgtcgattcagaaggtaacagcttaggatacgttggtcagggtagtatggttttcctacgagtagaaaaattaccaccgcaaatttatgtccacatcggtcaactaggtgaaaagagctgcataataaatgatccacagcctgaaatgagctcaaacgccaatatttgccgttaagggagaagataatgaaacttaaaccatcatatcttaagccattgtatctggcggccataatcagtttgagcagtggcatagcctatgccgattgccaacccaaatatgcaataccggcaccggcaatcctggttgatatgacagatcatctcactctgaacagtaatgcaacctggatactcaacacccaatattctggctattttacatgcacaagaaattcactatggaaacaaaactcggttgctaacggttcgccttttaccaaaaacaaagttgttttaggattcaatggtggcaaaaattatgccgaagtgactatcacgaatctttctcctggcaacagtattaatctgggaaacagtaacgacacataccctgccagcaaattgcaagcccaatttacacttaatgtaaagctactgagtggcagacccggtggtagtaatattcacgtcttttccggcaattctgcaacattaaaaacggctgtaattgcgatggataccaccaacttaggactccttgatgccattctccgtttcgctaccgatttcctgacttttattcttacttgggagtggccgacacattctgaagatatctattatcaacccgtcacgatgatttttaatcacagagatacaacttgtcacttcttaaatgcggggttaacagtgaatctaccaaaagtcaaccgcattagattgcttaacggggcagataaaggagaaacgccttttaccctcaactttgaatgcaaatatctccaaaacggtaaaacttcacgctcagttaaagcttacctgagcagtaataatctgctaccaaatgacaatcgaactttaattgatagcaaagcaggtgccgctaaaggtgttggtatccgtgtttctcagacaagtgattcaacgccgataactttcagtgcttcgcaatcctcatcccaaggtgcaacactactattcagtaaaaactccggtaatgtcatcgataaacactttaccatcgaccttaatgcttactaccacgtttatgatccccaaaacatcatagcaggggaactgaaagcaacttctgtactgaactttgaatacaattaatcaagaggcaaagggaatgcctcttatttccctcattcgaattaaaattttatgtttcaatcagtaataatttgtaataaagtgtttctatagaaaaattcatttacatttataaccttccctgaatttacgtaacacaatgataatcctaacattaagtaattattcaaactcgcttaatttatcaacaaaatagtggaattctatgaaaaatagaaaaaaacatactttcacttatcaataaaattaaaaaaataatatcaagataatattttacaaccttattaaagaataaataaaaataacaaacaaccagaataaaaaatatattcaaaagagagtaatacaataaaaaaccacataaatagaaaaataaaacatatgaaaacattcaatcaccattgattgacaataaaaatatttcattaaaatcaatgatataaaaataaataacaaataaaaaccttagaaaaaaatataattacacgtaatataaaaatgtgaaaaataacttgaaatagcacaggaacaatataaattttattctccaaaaacacctttaatataaaaatagaaagataaatatttatattatccacaaataaattattaaaatttctttattcttatatacccctctattattatattcttacaatatcacccggagtaaatatttgtaacacattgttacttattttaacttaacatttataaccatatcgaatatcctgcaccgcaccaataacaatggctctattatgaaattagctcaaacctgacagatacgacttagttttaactcagagtaaagagaccatatcggtaacaggttacctttttatgaaaatgatacttattcttataacggcaatattaatatcaattagtttattactcgctgcggtgttcttacgattggcagtactataattaacagtactatataaaactaagttcaatcacttccgatattacactagctggtttacaaatcacttttcttttgataaagcgacttacaggcacaaaattaactcaaaaatcatgatcatatctgatgaataattcaatctagacaggcaatattttgtacacaaacagcacataaccatatagaaattaataaaaaaccacagaacaaattagcaaaataataatttttattacagaaaatatatttatgaatcactaataactctggctatgctggatttattttgctaatatcagcctgttttttattcagagcaaacgaggaaaagcaatgccctctcaaacaacgatgaggacaactgccatcttcgctttctttatctcactattgttttccgcttttagtcatgcttcaactagcacagctaaaagcatagagtattctcacaatgacatgcaaagcaatttgccagatttgcgaaaatacccttcgggcaccctacgtaagaaagcgtttttaaatgttgttgtccccgtgattgatcaacacaatcaacaaattatgcaggaacggaaatggctactggaacaccaaaatgacaagctttggtctatacagggtatcaaacgcctgcaacaaatttgtaaaaactacaacgtgagctgtagcagctcgcctaaaaaaattaactggaacaagctactaagtcgtgttgacatcatcccaacccattttgttgccactcaggccgcaacagaatctggttggggaacatctaagcttgcacaacagaataacaacttatttggtatgcgttgcggtaacaactgtaagaaaacccaaggtaaaataaaaggttattccgcctatccgactatcaatgattcggtcaaagcctatatgagaaatatgaacacccataacgcttatgaatcattgcgtgcttcacgcgccaagcagagaagccttcaggaatcactcaataccagcaaattgattgataatcttgaaggatattcacaattgggttcgacttacaacaactacctgcacaaagtatttaacagcaataaagggcttattactcaggcgcagaagttagctaaaaacgatcacgactaagagcctgagtaagtcattagcatgaatatcttgtgtttgaatatttgtgctaagtaccaaaatcatccgttaccataaccaactatggaacggatgattttcttatgtccaccggtttattcttttcattgatagaatgtttaggttaaatactataatatcactcaatcttatattgagataaaatgatttaccagagtttaatatgaatttcttttcttttgagtttcttggttcctttgttgctttctttctcttgtattggatgctacaaaaacatgcgaaaacacaaaactacctgctgataatcgcaagttatctgtttgtcttttcctttaatccgcttttcaccagcatcctatttggctatacgctatttatttatcttttaacaaacgtagccagcaaatttctatccaaccgcatcacgtttactatcctgacaataggtattttggggtgttttactctattcaaatattattctttctttcaagaaagtctccaacaagcgtttgccaaatttggtttgtccatagatttacccgtactaacactactcgtccctctgggtttatctttttatgcatttcattccgtcagctatgtcgttgctgtcgccagaaaagaaatacccaaagcatcatttcctgatgtcgctttatatctatgcttttttccgagtattgttgccggaccaataaaccgagctaaagattttctgcctcaaatccagatatcatcaagagtgatcattgaaccatcaagagccatattattgattacattggcgataaccaaactatttttgttcagctcttatttatccgaaaattatgttaatccggtttttgatgatcctgtcagctacaatgcagggcaaatcttggttagtatttatgcctatgcttggcatatctattttaatttttctggttataccaatcttgttactggattagcactactccttggattcagagtacctgaaaacttcaatgccccttatctggctgaaaacttacaagccttctggcaccgttggcatatcagtttatctgaatttatccgtgattatgtctatattcctcttggtggtaataagaaaggatttttacgtaaaaatcttaatttgtttgtcgctatggtaatctctgggttatggcatggagccggaattaatttcattatctggggagctattcatggattgggattaatcatcctcaatgttaaataccagttatttcctccaatagacaaaaaaaatcaaaacattccccaaaacccagtcatctcatttctatccagaatcattactttccactttatctgtctggcatgggttttcttccgttgtcctactctagatgatgcactaatattattaaatcaattgatatcatcaaatttatttcactcgataatagccaatagtgggttgttactgatgttctggggactctttattatttatccgtggctgattaatctaaaaataatggttgagaaaatgtattctcagatttcatggatatgctacccaataccattagcaattattctgactttggtatttatgatttcaccacaaggaataccaggattcatttatgccaatttctgaattcaaatctaatttaaaaacggctgggcaagtcatttttatcgtaatattaactagcctactgttaatttggctaaatcatcgttcactggatagattctggcaacaggaatatcaccggcaaagtctttgggcgactttgcaaggtcatccgctctgggatttcggtgataacctggaacaaggtgtactcgctgcgggggaagctttcctgtcacatactaccagcaataacagtaacaaccatcaggaaactctccagaaaactgatatcacactgcctgcggattttcagattggactcaagcttctgagtggttatccctctcctgttacaaatctgcctgcaactttccctgagttattacaaaaatcgccccatactcatcctgttaattcaccaataccccatgatttaaggaataatgtttcccccagtacggttatcgctaaaactaacgtgacactgacagccaaagataaggtgctgtttgctggagattcaatgatgcagggtatcgccccccatctgaaacgtcggctctaccaggattacagtatttcaagtattaatctcagcaaacaaagtactggacttgcttatcccagtttttttaattggccggaaactatcaataaaacactggaagccaaccatgatatcaagctggttgttatttttttggggccaaatgatccctgggatatgccaccaaaacatggaaacatctacctgaaatttgccagtcctgattgggaaaacctctatcgccaacgtatcgaaatggtccttaccgaagcacgtaaccacggtgctgatattatctgggttgctcctcccaatatgcgacagaaaaaactttctgccaacatgaaatatctgagatccttgtatcaatcagaagtcacgaaagccggagaaatctatgtttctgttaatgatattttcaaatatcatgcaaatgattattccgattatgtcggcgacaatagtaacaaaattaaactcagaagcggtgatggtatacactttagcctgaaaggccagcaaactatctcagataacatattttcattgattaaatttattcaggaacccgctaaacaaaatgaaaatagttaaacaacttcgtcggcgataccaagctgctagcattagtctggtcatcacactctctttaagtttgatatcgtgccataaacaaaagccagggccgttgccaacacaacagtctgcaaaagagggccaacagctaatagactttggtgaaccgaatttagctttactggcggataaacttcacaacagccgccataatcaactgcattttgttcagataggagattcccatactgccgctgacttttttaccggcaagctccgctctttattgcaacaacgttttggcaatgcagggattggttttgttagcccaattaatgtacctggtcaacgtaacgctatggtcagtatgaccgataataagcagcaatggaaactcaccaccagccgcaaagataatcggcctgattttcctatcggcggtacaattgcagagcccaatagccaaataagtcaattaattctaagactgtttgcaccatcccatgatcgctatcaactcaaaacgttataccaagcatcggatgatgctcagattctggtacaatctgcaaccaaacgaatactgaaattaccggcaacccacgatcactggcaattttctactgaagaatcagtgacattcccagttaatattatggcgatacaaaataatcagttaaaattaggcggctggtttattaatcgtaaacaaccaggtgttatgttatccgccttgggtatcaatggtgcgactattaatatgatggataagtggcagcccgaatggattgatacattagttcaaatgcatcctgatatgatgatcctcgcttatggcacaaatgaggcatttaatcattcgctggacttaccaagctatcgccagcaactggaaactaagataaagcagattcgtaatcagttaccacaaacagttatccttatcattgggccgggtgattctttgaaaaacaaccaatttacaagttgtatagcacaacaatcaacaatgttggataatatcatccatattcaacaaaaagtcgctcaagatcagcacacactattctggaactggcgtgcatatatgggtggaaaatgctcaattaggcgctgggcgcaacaagatcttgctcgtcctgattatgttcacctttcagccgcaggttatgagcgcagtgctgaagctttatatcaacagttaatagatgctctcggtcaataagcaacaataaggcttgactgggagtagtgctaaatacttctcttgtttttagtgcagaaaaattaaacttataatcttagatttacaatatgtatgagctcacacaaaacccatttgataaagacaaactatcttttttgctgtatttaatgcgttgaaaataagtttataccatgtgtaaaacatagcgttaaaaagagtatttaaaatatgatttttccaaaaaagtatcctctcagcacgataaaaaggctcatctccggctggaaagaatgtagtttcgaacgttaccaacaagcgtattctctctatggtggtggaatatctactcatccagatattgtacgttttttaaatgaaaaatttggcaatagttttatcttttacgtcaaagaaaatccacaaatagaaaacgttatcgaaggggcatactttacatgtaaagatcatcatctggcagcaagtcaccaaaaggactactattttttcagttacgatgaaattctcttccctattgccaaacatctaaaaactattatccctaggaagtcaaaaaccatatcacctctgcacaaagaaaacttcgtcaacatctattatggccgattaaacaagcgaacaatatgccttgctaaagaagatttttcttataaaacaagaagaaatcggagtaatgaaattaataaatttaagcgtgcaggcggagaaatacatcaaattgatgacttcacctgccaagaatttgttgatatttataccacactgtacgaaaaacggtggggaaaaaaacacagtgaagaagaaaaaggaaaattaaccgaactatacactgaactcaaacagcatctgtacggatgtgtattaactatcaatggaaccccagccgcctacgatttagttataaaatcagacagccctcaatgggtttcattcgatgcagtaaacggtggatacgatcctgaatacgctaatctcagccttggaagcattgtcatgtggttaaatattcaaaatgcttcaacgctctgtcagcagaatcaaaaaacgatgcgctattctattggtaaacctactttcgcctataaagatcgctggtgccatcgtcaccagttagcaagaacactattttaatgtcaccaatatttccaaatagttaacttatcctgccgccttctaaggaaggcggtactaatctaatacaatctcttaattcatatgaattacaacatggcaaagaaaaccattccaacaatggcacctattgtcccaagaatagtttccataattgaccaagttttcagtgtttgagattctgttgcaccagtaaatttaccaaataaccaaaagcctgagtcattaacatggctcaataccaaagaaccacccgcaatacaaattgaaagagcggcaagctgggcaccagaatatcccagaagatcaacaacgggcaaaatcagaccaacagttgtcaaacaggcaacagttgcagaaccttgaataacgcgtactgtaccagcaaggatgaaacacgctaatgcaataggcagacccgccccaatcaatgcgtttcccaaagcagggccaacaccagaatccactaatacttgtttgaatacaccaccagccccagtcaccaataaaataattcccgccggttgaatagccgaagagcaaatatccatcactttctctttactcatcccacgacgaattgccaaaccataaatagcaatcaaacaagcaaccaaaatcgcagaaaatggatgaccgataaattcaagccactgatacaactcagaactctgttcaacaaaattctcaccaatagcctttaacccaaccaaagccaaagggaacagaaccagtgacaaactcaaaccaaaagatggcatcttaccttgaccaaggcttggctcacttatatccacgggcaaatccagagtgacatacttactgataaaattaccgaagattggccccgccagtaacatcccaggaatcgctgcactgataccgatcaagatcatccagccaaaatcagcattcatctgtgaagccaacaacatcggcgctggaccaggtaacaaaaatgccgctgcggctgcgacaccagcaaacagaggaataaccaacttcactacattaccgccagtacgacgcgcgactgcgaacgccacgccaatcaataaaacaatagctacatcaaagaacaaaggcaaagcacaaaccaagccagcgatccccaatgaataatgagcattcttttcaccgaaactatttagtaacttaaccgcaatctgatccagtgcgcctgtttcatgcagaactttaccaaacatcgcgcccagtgcgacaacaatagccagaaaacctaacgttcctcccattccttcttgcattgtttcagcaattttatccagtggcataccagaaaaaacacccgctcccatagaaaccagtattagcgcaacaaaagcatgtattctggccttcatcaccaaaaacaatagtaaaagcacagaacccaccgctgtcagcactaaggttaaagtactcattatttttcccctgaaatgacactattaattattcttatcgagtgatttatcacttcatcaagagatgatctaatgtcaaccagataaacatcctgttcatcactccccggctcttctaatacctcaaactgagataccaacatttgagatttaaaaaaatgatctttacgtgccttcaatcgacttttaattaaatcaaagtcgcctttcatataaagaaatgaaagattcttattattatcacgcagtatatcccgataatgtttttttaaagcagagcaaacaatcagggaaatcgggtttgtgcgttgcatagcaaaaattgcatgattcagtgatttcaaccaaggttcacgatcttcatcattcagcgcgtagccttctgccatcttattaatgttagatcttggatgtaaaaaatcaccatctaaaaaagcagaatccaatttataggccacagcactggcaacagcagatttaccactaccggatacccccataagcacaaaaacatgattcgaatgctgggtatcgctcatataaactcctcaacgtagatattttatccacaaaatgttaccggtaactgttatcggtaacattatcagaagtagagatgaaattcgcaacaacacagaatattcaggaaatataaatgtgatatttatcacaaatgagttcaaaaaaacgcaaatccagcagaccgattagatactctctcccagagataactgaaaaccgatatcaattattttttgcggtaaatgttcgcccttcagccgagccattaataattcggcagccctccgccccaataagtcacgagacgtcaatacactggcaagttttggtgtcatcacctgaccaacatcatggccatgaaagccagctatcgcaatatcatgtggtacagctatcccttgacgttggcactcgaaaattgctccgattgcgaggtcatcgttagtgcagaatagaccatcaacatcaggatattttgttcgtgcttcattcagtaactgcccccctaatgtgtaagaagagctgtctggtgtcattatcttgcctggctttaacccggcgcttttcattgcagcttcatagccctccagacgaataattgtcctttcatcttgtctcgcaccaagataaatcaccctctggcaaccacgctcaatcattgcgattaccatctgccgagctgcttcaaaattgtcaataccaactgccatatcaaaacaaggagaaacacaatccatcagttcaacgacagggataccagccgttcccaacatcttcaaagttcgtggagtgtgagtacgttctgaaagaatcaaaccatcaatattataggaaagtaaagaaatcaaacgctcttcttctttttctgagcgataaccatagtgagccaacatagtttgataaccataactatccgtcacatattcgataccacgaataacctccgcaaaaacttggttagtcaaagaaggcaataaaataccaatagcatgactagtggaattagaaagaatatccggcactttatttgggatataacctagttcatctaaagcatccgctattttctttcgcaattgctcagaaacttgatcaggattacgcaagaaacgacttaccgtcattttagttataccaacacgatcagcaacatcttgtaaaataggacgttttttcttcatatttcaatgcaatatagaatgagtaaagtttagaatgataaacgtagtgctatgacatatttatacccgtcatctttcaagttgcttctttgttggctgcactcactcaccccggtcacatagttctctatgctcccggggattcgctcccttgccgccgcgatgcatcttgaaatccattgggtatatacactataaggatacatttttttaaaatttagtctggatgtgaaactgtaatcccaatttatttagtgtatcgtaaagtcttattctttagagtggagatataagacatattttttgtgactaagaggatttcgccgctaatatattaccgaatgatttagagcaatgagccaccacaaccagcaagaaccacactatgacaataagtaagagctcgaaaattgccaaacctatcaaaatcagaagcagggacattaagtcagcttaggagaaatgtccagaagaaattaaggtttaatcattcgatactggctcaaacttgatatgaactacgtcgtcaacttaagcaaagtagccatgcaattaggaaaaaactctcgttaacttatactaattaagaaaaagcggcgttattaaggtgctcaaaaccgatatcgaaaataacccattaaccgacatgcctatatcgcccaacggaacatatatagaaggttgaactcagctacggggagataaaacgtagacaatgaaatcatgcgtatacacttatcatcagcgtattgaaagcattcattaaaagtgacgaacgagcctcatttcctacaatttagttcgtctagcagctcatggtgtaagccctagtgcaaagtttttacgatgtgtaggacaaaatcccaaagaagtttcaccaattacgggaagaagaacaaattatatcatctaagaaaagcgggaaaaaattttcccaaagcaaattttatacagagggtgaaaaaacataccgctaaatacaaaatttccagctattaggcggtcagcatgataactttacaaatctcatcggcttataaacagctctttagccgttcactttgtgggccgtcgcgagtcgcgacgttcaaatccgatttccgacggagttgtcctatataatgcggatagacaggtcgcggtagacacggtaaccagataatataagcaaataaaatgatacagaccctgatatgcaaaaacccccagctttcgctgagggtttctacggtatttaaagcctggcagtgtcctactctcacatggggagaccccacactaccatcggcgctacggcgtttcactgctgagttcggcatggggtcaggtgggaccaccgcgctatcgccgccaggcatattcggttttcttccggccgttgtcgctcttccgccacaaccacccgaatcaatctctgaacaagctgaaaattcttctctcttctgtcttccgacaccaaaacaccttcggtgttgtaaggttaagcctctcggttcattagtactggtcagctcaatgcatcgctgcacttacacacccagcctatccacgtcttcgtcttaaacgttccttccgtgacctcagtcaggggaagactcatctcaaggcaagtttcccgcttagatgctttcagcggttatctctcccgcacttagctaccgggctatgccattggcatgacaacccgtacaccagcggtgcgtccactccggtcctctcgtactaggagcagcccctttcaatcttcctgcgcccacggcagatagggaccgaactgtctcacgacgttctaaacccagctcgcgtaccactttaaatggcgaacagccatacccttgggacctacttcagccccaggatgtgatgagccgacatcgaggtgccaaacaccgccgtcgatatgaactcttgggcggtatcagcctgttatccccggagtaccttttatccgttgagcgatggcccttccattcagaaccaccggatcactaagacctactttcgtacctgctcgaaccgtcactctcgcagttaagctggcttatgcctttgcactaacctcacgatgtccgaccgtgattagccaaccttcgtgctcctccgttacactttgggaggagaccgccccagtcaaactacccgccagacactgtccccggcccggtttacgggcccaggtgagaacatcgaacattcaagggtggtatttcaaggatggctccatgcagactggcgtccgcacttctcagcctcccacctatcctacacatcaaggctccatgttcagtgtcaagctatagtaaaggttcacggggtctttccgtcttgccgcggggacactgcatcttcacagcgagttcaatttcactgagtctcgggtggagacagcctggccatcattacgccattcgtgcaggtcggaacttacccgacaaggaatttcgctaccttaggaccgttatagttacggccgccgtttactggggcttctgtcaagagcctcgccttgcggctaaccccatcaattaaccttccagcaccgggcaggcgtcacaccgtatacgtccacttacgtgtttgcacagtgctgtgtttttaataaacagttgcagccagctggtctctgcgactggcttcagctccggaggcaaactccttcacctaccgccagcgtgccttctcccgaagttacggcaccattttgcctagttccttcacccgagttctctcaagcgcctgagtattctctacctgaccacctgtgtcggtttggggtacgattcaatatgacctgacgcttagaggcttttcctggaagccgggcatcaaccacttcaccgccgtagcggctcgtcatcacgcctcagtgttcacagaagagcggatttccctgctcctcccacctacacgcttaaaccgggacaaccgtcgcccggatggcctagccttctccgtccccccttcgcagtcacattcagtacaggaatattaacctgtttcccatcagctacgcctctcggcctcaccttaggggtcgactcaccctgccccgattaacgttggacaggaacccttggtcttccggcgagcgggtttttcacccgctttatcgttacttatgtcagcattcgcacttctgatacctccagcaggcctcacagctccaccttctccggcttacagaacgctcccctacccaataacacttgcgtgtcactgccgcagcttcggtgcatggtttagccccgttacatcttccgcgcaggccgactcgaccagtgagctattacgctttctttcaatgatggctgcttctaagccaacatcctggctgtctgggccttcccacatcgtttcccacttaaccatgacttcgggaccttagctggcggtctgggttgtttccctcttcacgacggacgttagcacccgccgtgtgtctcccgtgataccattcttcggtattcgcagtttgcatcgggttggtaagccgggatggccccctagccgaaacagtgctctacccccgaagatgaattcacgaggcgctacctaaatagctttcggggagaaccagctatctcccggtttgattggcctttcacccccagccacaggtcatccgctaatttttcaacattagtcggttcggtcctccagttagtgttacccaaccttcaacctgcccatggctagctcaccgggtttcgggtctataccctgcaactctttcgcccagttaagactcggtttccctgcggctcccctatccggttaaccttgctacagaatataagtcgctgacccattatacaaaaggtacgcagtcaccctgattaatcacggctcccactgcttgtacgtacacggtttcaggttctctttcactcccctcgccggggttcttttcgcctttccctcacggtactggttcactatcggtcagtcaggagtatttagccttggaggatggtccccccatcttcagacaggatttctcgtgtcccgccttactcatcgaactcacagccataccatcttcgagtacggggctgtcaccctctctcgccggcctttccagaccgttcctctgatgctatcgctgatgcaggttctgggctcctccccgttcgctcgccgctactgggggaatctcggttgatttcttttcctcggggtactgagatgtttcagttcccccggttcgcctcattaacctatgaattcagttaatgatagtgcaacgcattgcactgggtttccccattcggacatcgccggctattacgcttcatatcagcttaccgacgcttttcgcagattagcacgtccttcatcgcctctgactgcctaggcatccaccgtgtacgcttagtcgcttaacctcacaacccgaaactgtctcggactgttcagcttgagagacacctcaacaatacctcggcgatattattgagtatttcaatttttcagcttgttccagattgttaaagagcatctatcgctaaacagattcgcttaaatccgcttaaagataacctgacaacgcctttcacccgtcatcccgcaatatggcgtcccctaggggattcgaacccctgttaccgccgtgaaagggcggtgtcctaggcctctagacgaaggggacccgcaggtcagcttcgcagactcatttgcactctattttcatcagacaatctgtgtgagcactgcactcaacctctctcaggtaaggaggtgatccaaccgcaggttcccctacggttaccttgttacgacttcaccccagtcatgagccacaaagtggtcagcgcccccctttcggttaagctaccgacttcttttgcaacccactcccatggtgtgacgggcggtgtgtacaaggcccgggaacgtattcaccgtagcatgctgatctacgattactagcgattccgacttcatggagtcgagttgcagactccaatccggactacgacagactttgtgtgttccgcttgctctcgcgaggtcgcttcactttgtatccgccattgtagcacgtgtgtagccctactcgtaagggccatgatgacttgacgtcatccccaccttcctccggtttatcaccggcagtctcctttgagttcccaccttcacgtgctggcaacaaaggataagggttgcgctcgttgcgggacttaacccaacatttcacaacacgagctgacgacagccatgcagcacctgtctctcagttccctaaggcacttcgctgtctccagcaaattctgaggatgtcaagagtaggtaaggttcttcgcgttgcatcgaattaaaccacatgctccaccgcttgtgcgggcccccgtcaattcatttgagttttaaccttgcggccgtactccccaggcggtcgatttaacgcgttagcttcggaagccaccgttcaagaccgcaacctccaaatcgacatcgtttacagcgtggactaccagggtatctaatcctgtttgctccccacgctttcgcacctgagcgtcagtcttcgtccagggggccgccttcgccaccggtattcctccacatctctacgcatttcaccgctacacatggaattctacccccctctacgagactccagtcaaccagtcttagatgccattcccaggttgagcccggggatttcacatctaacttaattgaccgcctgcgtgcgctttacgcccagtcattccgattaacgcttgcaccctccgtattaccgcggctgctggcacggagttagccggtgcttcttctgcgggtaacgtcaaagtccagccctcttcaggctaaacccttcctccccgctgaaagtactttacaacccgaaggccttcttcatacacgcggcatggctgcatcaggcttgcgcccattgtgcaatattccccactgctgcctcccgtaggagtctgggccgtgtctcagtcccagtgtggctggtcatcctctcagaccagctagagatcgtcgcctaggtaggccattaccctacctaccagctaatcccatctgggttcatccgacggcgtgaggccctttcaggtcccccactttggtctcgcgacattatgcggtattagccaccgtttccagtggttatcccccgccctcgggcagatccccagacattactcacccgtccgccgctcgtcagcaaaagtgcaggcactttcctgttaccgctcgacttgcatgtgttaggcctgccgccagcgttcaatctgagccatgatcaaactcttcaatttaaagtttgatgctcaaagaattctgactaattatttcgtaatgaattaactgttgttcactcttcaagactttaaaacgtatttttttgtgatacggtcttgtgagtgcccacacagattgtctgattaattgttaaagagcaggctgacataaaaaataacattctcgttcagccgggctgcgtatactacgctgttcgcccgcagagtcaagcgcttattgcgccggttctctgcccgacctcacaatgtttatcagcgttgtgtcggtcagtggtggcgcattatagggaattctttgacgctggcaataattattttgaaaaaaattgatcgtttgattaattccacagcaaagctctactttatacctacttaccaacagatttatccacatatggctagttggatgaaaatttatcgagcatcacgcaaacgttttcgttacaattcggtggttaaaatcatcaagcgattttatctgactatactgaaatgttattgcagtgcccattttttatgtcctggtatataccctatggatttcaagatgcatcgcgacggcaaggaagcgaatccccgggagcatagcgaacgatgtgaccggggtgagcgagtgcagccaacaaagaggtaacttgaaagataacgggtgtagtgggttcttcccaataacatgttactgccttacaaaatccaagggatcaaatcaatgcaacagcttcgtccaatccatcgtgccctgcttagcgtttccgataaatcaggggttgttgaatttgcaaaagccttatctcaacgcggtgtcgaattgctttctactggtggcacagcgcgtttactcgctgagtcagatctaaaggttactgaagtttcagactacaccggttttcctgaaatgatggatggccgtgttaagacgctgcatcctaaagtacatggcggaatccttggccgccgcggacaagatgatgaaatcatggcacaacaccaaatctcaccgatcgatatggtggttgtgaatctatatccattcgctcagaccgtagctaaaccagattgtactttggcagatgccgttgaaaacattgatatcggtggtccaactatggttcgctctgcggctaagaaccataaagatgtagcgattgtggtaaatagtaaggattacaaaaaaatcattgaagagatggataacaatcaggggtcattaacacaatcaacccgcttcgatttagccattaaggcttttgaacacaccgcggcttatgacagcatgattgctaactattttggcaagctggttcctccttatcatggtgatacgactcaaccatcaggacgtttccctcgtactctgaatttgaatttcattaaaaagcaggatatgcgttacggtgagaacagccaccaagatgctgcattctatatagaagagaatctttctgaatcatccattgcaactgcaactcagttacaaggtaaggctctttcctataataacattgctgataccgatgcagcgctggaatgtgttaaggaattcgtggagcctgcatgcgttattgttaagcacgctaacccatgcggtgtagccattggtaaagatatccacgaagcttatgatagcgcattcaaaacagatccaacctccgctttcggcggtattattgctttcaaccgcgaacttgatattaaaactgcacaagccattatcgaccgtcaattcgtcgaggtaattattgccccctcagtaaataaagatgtcttacctgtgctggcaaccaagcaaaatatccgcgttctggtatgtggtgaatgggaggaccgggctgctggccttgattttaaacgagttaatggtggcttactggtacaagatcgcgatcttggtatggttgcagtaactaacctacgtgtggtttccaaacgtcatcccaccgaacaagaaatgaaagatgctctgttctgctggaaggtcgctaagtttgtcaaatctaatgccattgtttatgcaaaaaatgatatgaccattggtattggtgctggccaaatgagccgtgtctattccgcaaaaattgcggggattaaagcagccgatgaaggcttggaagtccaaggatgcgcaatggcgtctgacgcctttttcccatttcgtgacggcattgatgccgctgcggctgtcggcgtaagttgcattatccaacccggcggttcaatccgtgacgacgaagtaattaccgcggctgatgaacacggtattgctatgattttcaccggcatgcgccattttcgccactaatcaatagcaggagttaatctgatgaatattttaattgttggtagcggtggacgcgaacatgcgctggcatggaaagcagctcaatctcctttagctgataaaatctatgtcgctccaggaaatgcaggaactgctctggaaagcaatcttgaaaatattgatatctcagcgacagatatcaacggcttgttagtatttgcacaaagccatgatattgggctgactatcgtcggccctgaagtaccattagtgttaggtatcgtcgatgcattccaaacagcagggttgactatttttggtccaactcaggcagccgctcaattagaaggttcaaaagcatttaccaaagattttctagcacgtcatcaaatcccaactgcggcttatcagaattttacagctatcgaacccgctcttgcctacctagataaagtcggcgttcctattgttataaaagctgacggattggctgcgggtaaaggtgtgattgttgcgataacacgggaagaagcccagtccgccataaaagatatgctagccggaaatgcgtttggtgatgcaggccatcgtattgttattgaagagtttctaacaggtgaagaagctagttttatcgttatggtcgacggtaagaatgttattccgatggcaaccagtcaggatcataaacgcataggtgatggtgactccggcccaaacactggcggaatgggagcctattctcccgcaccagtcgtcaccaatgaaatccaccaacgcattatggaagagattatttatcctactgttaatggtatggctgctgagggtcatgtctatacgggttttctttatgccggcttgatgatcagccaaaatggcgaacccaaagtgattgaatttaactgtcgctttggtgatccagaaacacaacccatcatgatgcgtatgcgctccgatcttgttgaactctgtctagctggtgcaaaaggcgagcttgcgggtaaaacgtctgattgggatgagcgccctgctctgggtgtggtactcgctgccggagggtatcctgctgattatcacaaaggggatatcattcatggcttgccccaacaagaaaatgaaagtagcaaggttttccatgctggtacagcaatgaaagacaatgatgttattaccgccggtggacgcgttctgtgtgttacagcattaggagaaaccattatagatgcacagaaaaatgcttaccaacaagcagaagagattgaatggaataactgtttttaccgcaaggatatcggatatcgggcaattaaccgattgaaataatcataaaactgacgagggtcagagactgtccttcgtcggttcccaacgacaaaagtcattattagctaccaacaataattcgcggccagcaggcgcttccaaccaagcaatagttaactggctgtagctacttttttcgcgctgttcaagccatgacctcgcgtaaggttcaaactcaagggaaatcgtttcacctgcacaggtagtgactttaccgttattccagtgcccttgcaccaaacgcacatttcccactatcaacgcatcacttaattcaagcgtccgtttagcatcaaactgcatacgaacaatatcatcgctggaaagtcgctctcgtcgcgttttcgactgcttttgcataaaaatcacatcaccggatttattcaaacgaagttgttcagatagtggatttttatcattcaaaatttcacggcgaatttggcgcaaatctccctgcttatattcataaaaagtcacgacggtattgtcattacggtaggggctgtaaacactcatcagcacccgaggtttactgttctgatcgttgagacgccacaagcggacaacaccatcatcggcaatgaatccacttgcgctgaaagaaggttctttaggttgattggtacaggcgctgagcgcgaagacgaatcctagtgtcatcagcccctgacgaaccaacaaaaggggataaataataccccttctattttttcttttttgcaatgaaattatttaactgcgtctttcagagccttaccagcagagaaagcaggtacgtttgcagccgcgatggtaatttctttaccggtttgcgggttacgaccagtacgttctgcacggtggttaactttaaaagtaccaaaacctaccagttgtactgaatcgcccgcttttagggattcggtgattgcattcaaagttgattccagagcagcttttgcctgagctttagtcagttctgtgctttctgcgattgcatcaactaattcagtcttattcatagattatccttacagtgtgtttatcgtttgcaaagcatcgagtgcgacggatatgccgaatgacagcacccctgcatacacgcaccgatagccacttcttttcaccccccaaatgtagaacagagtgggggcaaaagtgaagtctttgaacatggcatttaaagcattaaatcacgttttttcactttactgcgttaaatttataccaatgttgctcgttcctgactcccggaggtcagctttcaatcctttaatcaactcaatatcccgctcttcgcagctaaccaataagcgataaatttcccattggatgtcccactcttgttcaatagccggtaatattttcagttcttcatcagtcatttcttttccggcctgagtcatttcaagcatagcaacagtgcggattgaaatttcactcactgcaattgcatgctccaatgtttcaccactcagacgggagtgaataatttcccctaatgcaatacatgcatcaatcgccgggtacacaccgtaaatatcgtaatcatccgctgagggaataatttgttccaacttttccagctgattatcaaaattcaccttggcatcttttacaactaatatttcccacaccaaatccagaatacggcggtaaagagcaggttctgcaaatgccgtctggcaacagaacatctggtaatttggatacatccgttcgcataaacttgccataaaggtcagatgctgccagctttcaagtttttccagccgtaaatgtatcgggttccgtaacattagcttttactcattatgcacaatttgctccgcagtttacctgaaattcaagaatatccacacgcttacaccgaatttaaggatttttctgtatcatttgttcaaaaaatggtctatttgaggctataccatctgcccaacgggttgtttcaggcaagcgataacctttcatacaacgttccacccatagcaatgcgctatcaagactgattctgtgtcctgtagaaatatacaacggattacaacgttttttacttcgccatacccaaccaatctgttcctctttatcaagcaaaggttggcaactgccgggctgttctcccaatagttcactttcaccacataaacgacgttttgccacaccaattgtgggcacattagctaataaaccaaaatggctagctacacctaaacgacgtggatgagcaatgccatgaccgtccaccatgactagatcaggtttgtatttcaacaactgccaagcagccattaatgcaggatattcacggaaagagagtaaaccgggaatataaggcaacgtagtttcaattcgcgctatctgatattccaccagttcaagagcaggataagagagaaccgctatcgctgcacgggtaattgctccctgtcgttcgaaacccacatcagcacccgcaatcaatttaggtggggaaaaatcatcataacagataacctgttgagcctttgctatttgttcctgacgtaatgctttcgtattaatcatatttttactgatgatatttagctgaaagtttatgtaccgcttcgacaaatacccccgcgtgttccggcagtatatcctgatggataccatgaccaaggttaaagacatgaccagaacccgtcccaaaaccttgcaaaattgtcgaaacttcctgctcaatccgctctggagaggcgtataacatagatgggtccatattaccctgcaaagcgactttattccccacacgacggcgtgcatcggcaatatctgtcgtccagtccaaaccaagcgcatcacaaccggtttcagccattgcttccagccattgtccaccacctttagcaaacagtgtcactggcacacgacgaccttcattttcacggatcagaccatcaacaattttgtgcatataatgtaaggaaaattcccgataatcccgccccgtcagtactccaccccaagtatcgaaaaccatcacagactgagcacctgctttaatctgagcattgagataaagaataacgctgtctgctagcttatccagcaacagatgcatcacggtaggttcggcatacatcatttttttaattttagtgaatgccttgctgctaccaccttccaccatgtaagttgccagtgtccacgggctaccagaaaagccgatcaaaggaacctggcccgcgagtgccttacgaatcgcacgcacggcatccgtcacatagctcaactccatttccggatcaggcactggcagtttttccacatcagcacggctgaaaaccggagatttaaaacgcggaccttcaccggcttcaaaatagagtcccaaccccatagcatcaggaatagtgagaatatcagagaagagaattgccgcatccagcggataacgctgcaaaggttgtaaagtgacttcacaagcgagctcagtgtttttacacaaagcaataaaatcaccggctttagcacgagtagcctgatactcaggtaaatagcggccagcctggcgcatcatccaaacaggggtaacatcaacagattggcgtaataaagctcgcaaataacgatcgtttttcagcgcattcatgacaggctccatctatatttattggccgcaacataatctgactacaatgaattagaacctcattgtaacatgataggtaaatctctcccgttgaattgcgccaaactgtacatcacgtatttcggcatagaacaatcgtatcttcaatcaaccgacgggcaatagtattatgtggtggaatcaatggtaattgatcatagtgataccaatccgcactaatcagctcttgcggatcatggcggatctcaccactgtcataatcagccagaaatgccatcattaatgaatgagggaaaggccacggttgagaagccacataacgtaaattgcgaattttaatattactctcttccatcacttcgcggacaacagcttcttcgagtgtttcaccgacttcaacaaatcccgccaatactgtgtacacccctccacgatggtgctgatgttgagccagcaaaatatgatcatcccgacgaataccgacaataatacaaggtgcaatctgcggataataacgttcatggcagtgatgacacagacaagcccattcactgacactatggtgcatttcattaccacaataaccacaatattgatgagagcgataaaactctgccaattgcactcctcggccagctaattgaaacaagccacgatcacttgcaacaatttgccgtaaagaaaccatatttgaaaccattttctgacggataagccaaactttttcgccttgccactcaccaataggcaaggctatttttccttgcagtgaccattgagttgccattccaaaaggtaactcacctttcgggagccaaatacgattttcattgctgataatccaccagccatgttctgtacctgtaatttgttgttgcatcatcatcactatgacatcttaattttaatatctgtatatacccgtcatctttcaagttgcctctttgttggctgcactcgctcaccccggtcacatcgttacctatgctcccggggattcactcccttgccgtcgcaatccatcttgaaatccatagggtataaatcatacgctttctaatcagaaaagcgtgctttattactattgtcatagaccatattgcccgatctggcagtaataggcattattctcaacgattaaatagactttgatctgaggagcacaacaccatgtctcaattgcttgccgtgtttgatctggatgacaccttaatttccggtgattccagcgctatatggaccacgtttttatgggaaaaaggtgtcattactgatccaacttttatcgaagcagataaaaaaatgatggctgattacagcgcgggttcactggatatgaatgattatctggcatttagcctgcaaaccttgcaccaagttccacaagaacaagttgatctttggctgactgaatttgttaacgaaaaaataagacctcgattttatccgcaagctaaagctcttattgcagagtatcaacagcaacaaatcccaattatgatcatctcagccacagtctcttttattgtaaaaaagattgctaccgaattgaatattcacacggcactgggcattgatatggtaatagaaaatggctgttataccggtaaaatagatggaattgcgacttttcgtgaaggtaaagtaaaacggataaaacagtggctggaacagaaaaatagttatcccaaaattattcgcttttacagtgattcaattaatgatctcccaatgtgtcaatttgccgatgaggtaattacggtcaatgctgatgcccatttaaaaaccgaagcacaacaacatggctggcaacaattaacctggtcactgtaaatactttcaatcagtaggggttgtagttttcataatcccttctatactactgcttactttcttgtcggagtgcctagcgtaagctgttttatcgcagcatacacaggctgagaccgttaattcgggatccgcggaacctgatcgggttaatacccgcgaagggaacaagagtaatcaaccgctgtcagcccacccaattttttacaggtctgtccagccatcaattatattactcttactcatttgcctgcgagctccagacaagcaactttcccaataacacagtttaggaatttgctatgtctcataatactgttatccctacaaccgatatttcaccaaaacccgatccggcacgcccacgtaaagctcaacgcgatgccgcccaagaatttattaattctattcaaggcgtgaccttcccaaattcacgacgaatttatcttcaaggttcccgtgacgatatccaagttccaatgcgtgaaattcaattatctcccacgttaattggtggcaccaaagaagaacctcagtatgaagaaaacgaagccattccggtttatgatacttccggcgcttatggcgatcctgatgccaagctggatgtacatgttgggttaactcaactacgtcaaccctggatcgacgaacgccaagatactgaacctgttgccgccctcagctccgattttactcagcaacgcctgacggatgccggtctcgatcatttacgtttcaatcatcgcccccatccattaaaagcccgtaaagacaaacgcgttactcaactgcactatgctcgtcaaggcatcatcacgccggaaatggaatttatcgcactacgggaaaatatgggacgtgaacgtatccgcggtgatgtgttacgccaacaacatcccggacaaagttttggcgctcagttgccggaaaatatcacaccagaatttgtccgtcaggaagtcgcggctggtcgggcaattatccctgccaatatcaatcatcctgaatcagaaccgatgattattggtcgcaattttctggtgaaggttaacgccaatatcggtaattcttcagtcacctcttcgattgaggaagaagtagaaaagttaatctggtccactcgttggggcgcagatacggtaatggatctctccactggccgttatatccacgaaacccgcgaatggatcttacgtaacagcccggttcctatcggtacagtccctatttatcaggcactggagaaagtcaatggcggggcggaaaatctcacttgggaaatattccgtgataccttgctggaacaagcagaacaaggggtcgattacttcaccattcatgccggcgtattactgcgctatgtaccgatgaccgccaaacgccttactgggatcgtttcccgcggcggttcaattatggcgaaatggtgtctgtctcatcatcaagaaaactttctctaccaacatttccgtgaaatttgtgaaatctgcgccgcttatgatgtttccctatcattgggagacggtctacgccccggttctattcaggatgctaacgatgaagcgcagtttgcagaactacatacattaggtgaactgaccaaaattgcctgggaatatgatgttcaagtgatgatcgaaggccccgggcatattcctatgcagatgatccgccgcaatatgacggaagaattagaacattgtcatgaagcgcctttctatactcttggccccctgacaacagatattgcacccggttatgaccacttcacttccggtattggtgcagccatgattggctggtttggctgcgccatgctctgttatgtgacgccgaaagagcatctcggcttgccaaacaaagatgatgttaagcaagggctgattacctacaaaattgctgctcacgccgccgatctcgccaaaggtcacccaggcgcacaaatccgcgataacgccatgtctaaagcacgttttgagttccgttgggaagatcaatttaatctcgcgctcgatcccgatactgctcgcgcctatcacgatgaaaccttgccacaagcctccggcaaaattgcgcatttctgttctatgtgcgggcctaaattctgctctatgaagatttctcaagaagtacgcgattatgccgctggtatggaacagatgtccgaagcattccgcgcccacggtagtgagttgtatcacagtgtagaggatgtatcccatgaacaatctgcctaacgcaccatttgccccaactgaacacagattggggctgtatccggtcgtggattcgctagcgtggatttcccgcctgttacagacaggcgtcaccacaattcagttgagaattaaagatctaccagaagatcaggtggaagaagagattcaacaagccattatgctcggtcgccaatacaacgctcgtctgtttattaacgattactggcgactggcaataaaacatggcgcttatggtgttcatctggggcaggaagatttagttatcgctgatctgaacgccatccaaaaaacgggattgcggttaggaatctctacccacgatgaacaagagctggcaagagcaaaatccctgcgtccatcttatatcgctctcggccacattttcccaaccacaaccaaagcgatgccatcttccccacaaggagtggaagcactgaaacgacaggtagaaaacacaccagactattccactgtcgccatcggcggaatttctcttgaacgcgtaccggatgtcattgcaacgggagttggcagtgtggcgctggttagtgccattaccaaagcaaaggattggcgtcaggcaactgcacaactgctttatctggttgaaggcattgagttgaaggggtagagaggttcttatgctgaatgatcaagaatttatgcgttacagccgacaactgttactcgaagatattggcccggaaggacaggaaaaactgaaatccagccacgtattgattgtcggactgggaggactaggcgctcctgcctctctctatctggccggagccggtgtgggaacaatttatctcgctgatgatgaccacttacacatctccaatttacaacggcaaatactttaccgcactgaggatatcccttctgcaaaagctgaacttgcagccaatcaactcaatgcattgaatccgctgatcaaaacaatggttcttaatcaacgtcagaacctggaatcgctgacaacaatcgtgaagcaagtcgatctggttctcgactgctgtgacaacatgacaacccgccacgctatcaatgctgcttgtgtggcaacgcgaaaaccgttgatcagcggcagtgctgtcggttttagcggccaacttatggtatttgaacccccttatcttcatggctgctataactgtctctaccctgaacagcaagagcctctacgaaattgccggactgcgggtgtattaggtccgatagtcggtatcatcggcacattacaggcattagaagccatcaaaatgttaactgggcttccctctccgttaagcggcaaactccgactgtttgatggtaaacaacaaagctggagcacactacaacttaaccggtcgcagcaatgcccgatttgcggagatatggcatgaaaattacggtaaacgaccagccgatggagcttatggcttctctggctatacagcaattgctagaacaacttgaacaaacacaaccgggaatggcactggctattaatcaaaccattattccgcgttcagagtggaatacgcatcgaattaatgatggagacaatatccttttgtttcaggctattgctggaggttgatatgttaaaaattgctgatacgacttttcattcccgtctatttaccggtacaggcaaattcgccaatgcaaatttaatgactcaagctatagccgcttccggcagccagcttgtcacgatggcaatgaaacgcattgatttgcagagcggtaatgacgctattttggcgccattgcaaaaacttggcgtcaaattgctgccaaatacttctggggccaaaaccgcagaagaggccctgtttgccgcccgtctggcccgtgaagcactggcaaccaactggatcaagctggagattcatcctgatgtgaaatacttgttacctgacccgattgaaacactcaaaggcgctgaaatgttggtcaaagatgggtttgtcgttctgccctattgcagtgctgatcctgttttgtgcaaacgtctggaagaagtgggttgcgcggcggttatgcctttaggcgcaccgatcggatctaatcaagggctactaacccgagatttcctgcaaattattattgaacaagcacaagtgccagtggtcattgatgccggcatcggtgcaccaagccatgcattggaagcgcttgaactaggcgcggatgctgtattagtcaacaccgcaattgctgtcgcacgtaatccagtaaaaatggctcaagccttcagaatagcgattgaagcgggtgaattatcttatcaagctggccgggcaagtccaaaacaacacgctgttgcatccagtccactgaccgatttcctgagagtgctctgatgacgaatcatcttacgaacagcaattttagttatcgctggcaacaattgagttgggatgacatcaccctgcgcattcatagcaaaaccgcgcaggatgttgaacaagcattaagcagtaacaaattaaatctggacgattttatggccttgctctcaccagcagcgaaaccctacatcgaaccgctggcacaacgggcacaaaaactgacgcgtcaacgcttcggtaacaccgtaggtttctatgtgccactttatctctccaatttgtgtgccaatgattgcacctattgcgggttctcaatgagtaaccgcatcaaacgcaagatactgaataaagatgaaattattgccgaatgtcaggcgattaaagcgctgggcttcaacaatctgttattagtcaccggagaacatcagggcaaggtcggtatggattatttccgccactatctgccgcttatccgcgagtatttcagctcaatcatgatggaagtccagcctatgacacaggaagagtactcagaattaaaaactctggggctagatggcgtgatggtttatcaggaaacctatcatcaaccaacttacctgttgcatcatctacgaggtaagaaacgggatttccactggcgattagaaacacccgatcgtcttggtcgggcaaaaatcgataaaatcggtttaggggcattgattggcctttctagtcattggcggacagactgctatatggtggcggagcatttattctttctgcaacgcacatactggcaaagccgttactctatttcattcccacgtttacgaccttgtaccggagggattgaaccggcatcgctaatgagtgaagcagaactggtacaactgatttgtgcttttcgtctatttgcgccagatgttgagctgtctatttccactcgtgaatctccattcttccgcgatcacatcataccactggcaatcaacaacgttagtgccggttcgaaaacccaacccggtggttacgcagatagtcgccacgaagaattggaacaatttatgccgcatgataaccgttctgtctatcaggtcgcagacgcattaattaaagccggattacagcctgtctggaaagattgggataactatttaggtcgataatttaattttctcttatctaaaataattctattttagataagagtatttaacaagaaataatcataagaaataagatttaatataaatatatccgatgaatttcaaacagtcatagatattacctcattattcactctattctttctctcaatgtgactaatatttcaacataacatttctgcaacaatgagcattgtcacgagcaacaaattagcctacagaaacacctatcaggataagcgcttataactcatttattcttgtattaatttatacaaattacaattcaccaccaacaaaaaatacaattgagtattatcccattattgataaagtgcccccccgaaaaacaaagtgctgaaagaaattaaattcatttctatctatttaaaaaggactaatatatgaacgtacaagaaatcctgaataatgaagattattctgatagcaagaaaaactctcataaagaactggttaacggctcattcgaagagggatataacggctggagaatcccagctcctgagtcagtagaaatcttatctgaaaatggcgttcactttatcagaatccaaagcgttaccggttctggcgtcattgatcaaattatcgaaggattagaacctaacactaaatataaactaacaggtacagctcgcgtatcatcagaatgggcctcatcagcttattttggtttacagagtcgcaccgaaggccccaacacttttgctgtaaacagcaccgattttacaaccggttcggtagaattaagtacagatcaagagggacttttacgcgtttatttattgaaagaccaagttggtcctcgaccagacggagaaaccgctgactttaccggttttattttagagcaagcttaagcatttaacttcgatatattttaacattttaaacatccagagttcacggctctgggtgttttaattggttgagaaaataaatttaaaaattataaattaatatcttaactggaatatagttcaattattttaagataaattcccatcgaaataatttagccctgtcatttattttcacattaattatcacaagcctaatcttcaatcaaaaaacatgattgaatattttttcattattgctaaagtatttataggaaaaaattattaagcaaaattaaatttaattgccattcatttaaaaggactcatatatggatatgaagaaaatgctaaatagcgcagattattctgatacaaaaaacgctaataaagagctggttaatggttcatttaacgaaggatatcgtggctggagaatcccaacccctgaaactgtagaaatcctgtccgagaatggcgttaattttcttagcatccaaacctattccagctctggtgtcattgatcaaataataacagggttggaacctaacgttaaatatcgactgacgggtacagcacgcttatcgactcaactaacaccacaaagggccttgcccgcttattttggcttacagaatcgcacatttggccctgaatcctttgttgtcaatagcttcaattttacgaccggttcagttgaattaaacacagatgaagaaggacttttacgtatttacatgctgaaagaccaatttgtagaacttccagaagaggcaactgctgactttaccggttttattctagaaagagtttaaacatcgggccttgatatatatacccaagaaacttcaagatgcagtttttagcacctgaaaatggtcgttaattctagacatcagcgagtccgctatatccggtagcgttgtggtgaaaaatttgaagacgttgtctcgaaattcatgtttatccgcaaaataacggttatttcgaacctgttcattcatgaccttccataatcgctctattgggtttaaatttgggctatagggaggaaggtaatgtaactcaatattgctaacataagcccactccttaacaagatgagctttgttgtaacccgccccatccacaataagatgaattttttgatgatagtcaggataagactttcttatttcattgaaaaaacagcaaatgttgtagtcattgatggtttgatattcctggaacaccgtacgaccaatggcattcaggttgagcgcgcccaatatattcaggcgagtccggcttcctgttgtttttactgtttttttctcgccttttcgcatccagccataaccgagtttggtgccttgagtcgggtgaacagcatcaagaaaaaggatgggttcgtctttcgctgtgactttaagattctcataatattcaataaattgtcgctgtttttctgcgtcgaatttatgagggacgccacaaggttttttataagaaaaaccctgacggtgtagccatttattcatgccgggaatgctaaaggtaatattccagagctgagcaacataggccacgatttcatgggtgtgatggaaaagatgttgagataagtgattgattaaaaaatcagtttgttcttgagaaagcaaactatcagaccccccattatcagatttaagtttaccttgattaaggtaatcgctgatatgacggttaacggtcatttcatgaagacgcagggcctgagcgatcatcactgaactccagccttcagaggccagcaggaccgctttgatgcgatcacactccctcttatcacggcaggtgtgatggagatgttcaagttcggctttttgttcatcggtaatgaatattttcatagcgaggataatgatctccatttcggataaaatcaagcatcttcaatgattacgggtatataccctatagatttcaagatggatcgcgacggcaagggagcgaatccccgggagcatagataacaatgtgaccggggtgagggagtgcagccaacaaagaggcaacttgaaagatgacgtatataacacccgaagtacattgctccgggtgtttaaagcctgtctggctaacttaaatcatgcaatggtttttttattggtggtgtcaattggaaatcagaaaaccgcacctgtaatccgtgccgctctggagaacaacacattgcaccaacaaagacaggttgtttatcttcaaaaaaaggagataacctcaacaatggccaccgaaaaccatcagtggaatattgcagtcttaaatatccctcttcacgagtcaaacgtaaccaaaatttactagcatcaccaggaaatacgcccatagaccaatcagaatgatgacgtgttagcacactaccaatcgaggcatgaccatcagaatattcaattccgcctttcagccaatgtttctcatcgactaatagcatgactcctgcctgatcgtataaatgttcaaaacagccttcaatacagagttgaaaggtgaaatcatcctcaacataacgcccaaaaacatgaccattatgacgttcaaagccataccatgttcgttgccaaaagtcagttttatgatctgtagtgacattaagccagccgcttccacattgccaatcagatggctcattaagccaatgatattgtgataaacccataggaactccctctattatcttccgcttgaattaatcaatttatatcctgcaagtaaggagatagagagtaaagcaatacaagcaaaagcgccgtgtaatgtcacaatatgcgctaatccgccgatgattgcaggccccagcaaaatccctgaatatcccatagtagaaaccgcggcaacagccagtgaatcaggcataattttctgttgaccggaagcggtaaaaagcattggtgcgatattagataatcctgccccgatcatcaggaaagagagccctagcattattgcggtcgatgctgagtaaataaggataaacccggaagtagccaataaagcactgctgataaaaacccgtcggtgtccataaagggcaataatcttatcaccgagaaagcggcccgatgtcatagcaatagcaaacaaggtataaccgatacccgcctgatgactactgatattatgtacgctggttaataatatcccactccagtccagcattgatccttccatgatataggcaacaaaacagagaaagcctaataaaatcacgatcccatgaggcatagcaaaaaatggcgtattatccgattcggcttcgtttaataatccactccataccggcagtaacaataaaataaccagcaacaccaccattaccatcgcctggagaggtgatattcccaaagataacaatgcactcaccgaaccggcaccagcgatcccgcccaaactaaataacgcgtgaaagccagacataattggccgccgagccattttctcaaccatgacagcgtggatattgaccacaacatccattgcaccaatacctgcgccaaaaataaataaaacgcaagccagtgttagcggtgtaggtaatacacttagccctggcaacatcactagcacgaccaaagcacataaagtgaagatttgccgacagccgaaacgtgcggctaacatgccggctatcggcatcatgatgaaagagccaataccgaacgccaacatcaggagccccatcgcgccattatcaagttgtagccgttctttagctaaaggaatcaggggtgcccaacttgcaagactaaagccggcaataaaaaaagcggcacgcgttgccatgatgggttgttttaccaaagagacaatattttgatcagacaactcatgttccttctatataatctatataaataaaatgccctccgatatgactaatcatggagggcattaagttacccaaaattaattttagaaaattgtggaatatcggtcagcgccccaataatacgagtagcctgttgatactgttccgcaaccgataaagcatgaggccaagcatacacgtagggaatacctgcctgcgttgctgctgtaattcccaaatcggtatcttcaatcactaatgtctgatgaacatccatagacttcaatttcaacatagcaagatagggatcgggatgaggtttcgtcctctcaacatcgtcacctgagattaaagccgggctttcgctcaattccaacaatccaatattcgccaaacagacttcccgcggcgcagtagagacaaagccaaaagggatacggtgctgttgtaaggccaatatcaacctggaaatccctggacgaaggtaacttttagccagcttacttttgtacaccgagacgatttgagcagtgatctctttctgttgctgagctggaaccccaatgtaatctaacgtttcctccaaactcaggccaataagttgctgtggttgtacatgctgtgtatagtcgggcgccaaatcacaaagaacatcaaagtgcagttgttcactgtcaacaatgaccccatcgatatcaaaaatcacattaaatctatccatgtgaaacattccattattttagatcggagatacggatcagcactttacagttcggagtaaaaagtggtttttggcttttgttagcaatatcgcaacccacagtgagaaaagcctgcaagtaatcattaaaatcaaaaacctggctaaccagacgaccggctggaataacaccatcacggatcatggtataagcacgttcaaaactgttattcagagaatcgatggaaccaatcactgaaaggctcttatcagcaattttcaagatatcaagattggcatgcttatctttaagcgccacattcaacaattttccgccaggtgccaaatgttcaaaaacgtattcggttaattgaccggtcgtatccacacagagatcgataagcgctgatttatcgccatatttctgtattaacgcctcatcaaaatcagtatacagctcacattctggtggcagattttctttggcaaattgaattcgactttcgtttttctcgaccatgaaagccttaacgcctctggcatgtaaagcccaaatgtagagcatccccattgggcctgcgccagctaccgctgcacgaatattagtatgagtaatgcccagtttatcaaccccggtcagcgtacaactgagtggctcagtcaatgatgcctcttccatactgacatgatcatccagctttatcagcgaactctctttagccagatattgctcagcaaatgccccatcataggaaacccctgcttcggttcccaattttttctcacaatgatttggactgcctgtctggcacatccgacaatgcccacaagaataggtcggattgatgacaacacggtcacccacattaaaacgcgtgacactcttccctatttgcgtaataacccccgttgtttcatggcccagcgtggttcccggaatagcaacaggataagatccggtgataatcccgacatccgtaccacaaacgccacacaccgcaatatcaacaacaacatcatcaggctcagcacagcgtaacggttcaacatcctggatttgcacatcccacacccgattaaatttaagtgctttcattacgctacctccttggtatccagcatatttaacgtcatatcagcaaaagtcagatcaagcttatacagaatttcgtttaaatgttcctgagtacaaattaatggtggacgaactttaagtgcacgacctttaccataacgagaaccccggatgatcaagtgatgagaattcgctattgcaatcgcttgtgccgcaaattcgggtgatggcgtatcaaagccaaacatataaccgacgcccctaacgccagtgatttctggatatttatgctgtagtgcgagtaagccatcacgcaaataagtttcattgcgttgcacattctccagaacttgttcctcttcaataatatcgataatttcgttaagcgccgttaatgaaagcgggttagcgcctgatgtactggaatgttcgaatgactctaatacatctaatgaactccgcatcagcacaccaccagtaggaatacctatgccaccagcacctttagcgaaaacaataatatcgggttctaattctttggcgtaaccggttgaagcaaaaaatgtcccggtacggccaaatccggtctgtacttcatctgcgataataataatgtcatgtttatgacagatgtctctgatcttacgataaaaatcaacagggaaaacgttatttccgccatttccttgaataggctcaatgataagacaggcaatattgtcatttgaccctaattgaataaattgttctaagtcaaaatattgattggattctgtattcggttcaagctctgacatgacactagtaggggttggaattttaaaagaaccatcaatgttgacatggaagtctttaattctaaaagcattacctgaaatttgcgctgtagctaaagactgaccatgatgagccagaaagaaagagataacccctgaacgtcctgttgctttttgcgcgatacgaattgcgcattcaaccgccccagagccggaaacatcacgtaaccatattctatcaatgcccttagggctatgtttaactaatttatccaaaatatattgtgacatttcatgggtataagctgaacttagatgtgtacatctgtcgatctgctgttttaatttttcagttattctgcgattagtgtacccaagtggaaggttaaatgtccccgaagctgcatcaatatacttttcaccatcaatttctaaataaggaccgtttccaacaaagcgagaaagcatatcttcaaaccgttttccattttccatcattttaattaccttgattaactatttataaccacaacaaataaaatcagattttaatatataagacaatatttactaaaaattagtttatatcaacaaaaagtctgcaagaacccaaaaaacatttaaaaaattaaagtattttgtataaaatatattattattttgaatgattggttaatagcatgcagaactgctgatttatagggttaatgataagaaattctgtacaaaccccataaaaactgtaccaaaatcctctataccctatggatttcaagatggatcgcgacggcaagggagtgaatccccgggagcatagataacgatgtgaccggggtgagcgagtgcagccaacaaagaggcaacttgaaagataacgggtatatcgagtgaaaaataagctgatgctacagcgcaagatcatttgcttatatttaagatatccacacaagctggctggtttacaccagtgaatagctcgtataaagttcaggctttaaaaaaagtaaagggttcagtctgtgtatgatccttgaacacccctatcgctagcttaaaatgactcgccagtaggatttctggtatatccaagctcgttggtgacgctaaagaacgaattccactgagcctatttaccaataaaaccaccaccattactgaaatattaaaagaacacacatgcaaaattatattcttctactacttagcttggcactttttggacctttgggtatcgatgtattcttgcctacggttcctgccattgccgaggattttaaagttaataatgaagtcattcagtcaacgatttctttgtttttattaattatggggctaggtcaattaatctctggaccactggtcgataaattcggccgtcggccagtagccctaacgggtatcaccttatatatcatcggttcggtgatcgcagcgctttctacttttcccgaaatgtttattgccgcgcgaattattcaaggatgtgctgtctgctgtaccagtgtcgtctgcattagtggtgtgcgtgatcgcctaaacggtgacgaagcggccaaagcctatggatttattaacggtacgctaaatattgttcctgctcttgctccgttacttggcggtattctggccgaaatgttcaactggcgagcgccattctggtttttgacttgctactcggttattgcactactgatcattgccaactggctaccagagacgcgccctgctaacactaagccaattcgcgggctaccactgaagcaatatttccaaattcttagcaatgcccagtttatgcattttgccttggttaatgccggcattatgggaatagtgattacctatgtctcatttgcaccaaccgtgctaatgactgagggccatatttcaccgctagcattttcattgatttttggtggcaacggactctggacgatgatcgccttcctaaccgccaataaaatcatccatcgacttggccgcccttgctgcctgctgttagggacaattctaatggcactggctagcctatctctgttctctggcatgcatctgccaactgtcgccagccagcactggctaagctatatgttgccggtttctttcgcctgtacaggtatggcatttgttatgggacctgcgaccagttatgcactagaaccttattctgacgaagccggtgtcgcttctgcactgataggattcgtccagatggctgtcggctccgctctctcgctcattgctatggcgttgccattttcgctcaaacagtcactcgtgttagttatgctactcggtaccacgctaatcctgtcagcacacatactcagtcgtaacctgaaagggcgggtagtttcgctagaaccctaaaatatctgtcatacacctaatcccatcatctgcatcaattgttgtgcttgctgaatcgcctcttggcgattcgcaatccctagcttctgatacagattccgtatatgtgtcttaatcgttgtcgtcgctacatccaactctgcggcaatctgatcattactgtagcctgagtaaatcaaccccaacacctgccattcacgctgtgtaagcggactattgcgaataagctcaggaacatcaggatgtgttagcaactgtgtgacaaaactttcatcaaaatgagcgaatttatggcgatgttgacgattgatatcccgcaaaatgcgctgcgcccgatgcaactccagttcagacaaggtattgagctgaataagctgacgtagctgttgggccatcaactcaccttcaatgacaaaatggctaataaatcctgtacggttagccagagacaacgcctcaatgagtgcactctgcgcttcgcttttgcgtccgatatgccagtaaagcaagttacacaacaataaattacgattcagatcgctgattaattgcaattctctcgcatgttgattcagtgtatccaaaatggactcagcttcatcatacaaaccaagcagaatctgagcacgagcaatattgcgccactggccctgattaaaatgattactgacgctttctggccgctcagtctgtgccaaccaccgaatagcggcgcttttgtcgtccatactctgccagatgatgactcgcagcttgtcagtattcgtacgccaatctctatgatactgcccattactcagcaggttttcacaacgcgccagataacggcgggcattatcaatatcccctctggtcaaagagcatttagccaactgggttaaacattgcaactgctgttgaggttggaagttagacaacacttccagcccacgacgtgccgcctcttcggcttcatcaagacgagaccagcaccacaaaagctgtgaacggatacgcaacaaaaattcatgcattggcaactgctccaaatgctgttcacggatcaattcaaatgccttattctgcgtttcataagccgtctgcaaatatccctgagctaataagatctcactttgctgcaacagcgcccacaacgcatagtgatgaacatgaaaacgacgcgcaagctgctcggtttgttgcatccgcgctaatgcatcagccaactcacctctacaatgtaatacttcaccttccacggaagttgcaacaatacgactgtattcattctgaggaagcagtgccgccaaagcttgtttcgccaacttatcagccatctccggcttaccactgttcatcgccacctgagcccgtagcgcatcgaattcagcgagcagatccggctctatagcaatttgtttctgttgcagtgcctgttccgcctggtttaacagggtattgacttctgaataacgatgttggctttgggccagccaagcctggagcagcaccagacgcggactctccaagagctgctcataaggcaacgcattcatacactcttccaacagagataactcactgtggttaaacagcgaccaagcatgttgcaacaaaatatcgcgcagcatagccgtatcccccgcagccaaggcatgatgaatcgcctcacccggatacccctgcgccaaccaaccttctgcggccgcccgatgcaactccggcaattgcaacgccatttcccattgacaacgttgacgtagaaatgaagcaaaaagcggatgaaagcgaaaccattcgccagagtcatccatacgctggataaacagcccctgacgttcagtctcttcaagacgctgctgaccattctcttcaccggttagacgaacaatcaagccgtcattcatggaacgtaagatagagctgcgtaacaaaaattcacgcgttgaactacccacctgattgagtacctcatccaccaaataatcggaaagatggccggcgttaatgcccgacaaacgtttagccgacagttcagcagcatcacacgactgccgtgctgacagcgcaataagctggagcgccgttgcccaacccgcgacttcattacataggcgcttacaatcgtcggcatcaagggatgtggttaaccgcttatcaaaaaattgctgcgtttcttgataatcaaacgccagttgctgactgtcaatttccagcagttgctcacgcacacgcagattagccaccccaagagaaggcaaattacgcgataagatggttaacgtcagattctcaggctggtgacgcaggaaaaaccgcatagcctcatgaatcatgttattcacaatcagatggtaatcatcaatcaccagaaaaatgggccgccgccactcactaagttcaataaataattgagcgaaaagcgcgggtaaattggcatattgatgtttttgagccaacacttcacttttaacacaatgtccctgcgtagcttgctgcaatgccgcgataagataactggcaaaacgttccggctgattatcgctctcatctaaagaataccatcccagattatcctgcccggcagcccactgagagaccaatgtggttttgccataacccgcggggctagttattagcacaagacgataattagacgactcattcagtctgattaacagacgctcacgcaagactgtattattcagacgaacgggacgactcagttttgatgggataagcattaatttccgtgcccaaagaagcgataagtaaaacctgcgccggaaccatatatacccgtcatctttcaagttgccctttgttggctgcactcgctcacccccggtcacatagtttgctatgctcccggggattcgctcccttgccgtcgcgatccatcttgaaatccattgggtatatttaaatgatttatttcatggtccgtaataacgccattaattggcccaaccaaatttagtgaaatagatggcttttgcaaatatgtttacgccccccatagcattaagttgcgcaccctatcacattcttgaacagcaaattccattttctacagataagttatggaagcgattagcaaattaccttaatcgatccactggaaaaaaatgaactcagtaaatacaaaagtgatacgcaatatagttactggctacgcccttctactcctccctgactaatacctctccaggatgatgctttagatcctgagagcattcagcatagtggttaaattttccttttcagctacaggatgaagactccatgcaacagtccagattagataaagcccagtttcaggctgcgctgacacgtcaatggcagcgctttggcctcggttcagcacaggaaatgactcagcatcagtggtggcaagccgttagtgcggccctgtcagaactggtgcccgcatgccctgtcatcaatcattccgagcaacaacgccatgtgaactacatctctatggagtttctgattggccgtttaaccgcaaacaacctgcttaaccttggttggtatgaagacgttcaggcttacctggcagaagaaaatatcattttaagtgatcttctggaacaagaaaccgaccccgctttaggtaacggtggactgggacggcttgccgcctgttttcttgactctatggcaaccgtcggtcagtcggccattggctatggtctgaattatcaatacggcctgttccgccaatcctttgaacaagggcaacaaattgaagaacccgataattggggacgagaatcctatccctggttccgtcacaacactcagttagatgttgaggtaaattttggtggcaaagtcgtcataaccgatgatggacacgaaacttggcagcctgaatttaccttgattggagaagcctgggatctaccggtcattggttatcgcaatggtgttactcaaccattacgcctgtggcaagcaacccatgcctctccatttgatctcgacaaattcaacgccgggcagttcctgacagcagaacagcaaggtgttgaagccgctaagctaacgaaagttctctatccgaatgataatcatcaagaaggcaaacgcctgcgtctgatgcaacaatatttccagtgtgcctgctccgtcgcagatatcctgcgtcgtcatcttctggcgggccgcaaaatagaagatctgcctaagtatgaagttatccaacttaacgatactcatccaacgattgccatccctgaaatgatgcgcattctgctggataaacaccagatgagttgggaaaccgcatgggagataaccagccatactttcgcctataccaaccacaccctgatgccagaaggtttagaatgttgggacgaagatctagtcagccacctgctaccacggcattacagcatcattaaagaaattaactaccggtttaaaaagttggtggacaaaacctggcccggcgagccagccgtatgggaaaaattagctgtacattataaccatcagatacgaatggcgaatctttgcgtcgtcgcgggctttgccgtcaacggggtagctgcgctgcactcacagctcatcgttaaggatctgtttcctgaataccatcaactgtggccgaataaatttctcaacgtgacaaatggcgtcaccccacgtcgctggatcaaacagtgtaacccggcactgtcaggattgcttgaccgtacacttaatcgcgaatggattaacgatcttgacgcccttaaaacacttgagccctatgcagatgacgccgctttccgcgaagagtaccgagctatcaaacaaagcaacaagatcttgctctccaattatgtcaataaagtgatggggctcaagctagatccaaacgccatttttgatgtgcaaattaaacgcttgcatgaatataaacgccagcatctgaacctgttgcatatcctatcgctctataaacaaattcaggaaaatccggcgctggacatcgttccacgtgtgttcctgtttggtgcaaaagccgcaccgggctactatttggcaaaaaacattatctctgccatcaatcaggcggcggagaaaattaacaacgatccaatcgtccgtgatcgcattaagatcgcttttatccccgattacaaagtttctgtcgcggagctcatgatcccggcggccgatgtttcagaacaaatctccacagccggtaaagaagcttccggtaccggcaacatgaaactggcactgaatggggcactaactatcggcaccttagacggagcaaatgttgaaattgccgaacaggtaggagatgaccacatcttcatcttcggacataccgtagaagaagtgaaagccttaaaagctgccggttatgacccactgaaactactcaaggaagatcaacatctggacaacatactcaaagcactggctagcggcgagttcagctatagcgataagcgagcattcgatatgctgctacatagtctgattgaaggcggcgatccttatctggtactagctgattttgcctcctattgtgatgcacataaacggatcgataccttgtaccgcgatactcaacattggacacgtagcgccattctgaacaccgctcggatgggtatgttcagctctgaccgaacaatccgtgattatcaacagcgcatctggcaagcaaaccgataaggaaagatcatgggggagaagagcctcgatcatttagcgaccgaggctggcattgtcgccagctacattaatgcttatggcaagccacaagcgattccaacggaaacccgacatcgcttgttagatgcgataaacgtaaacaaaccggccaatgcgccggtttcacccttgccgacagtaaaaatttttactcaaggtgaacacttcacgatcactctgaaagatgaagagcgctaccaatggcagatacggacagaacaaggagaggaatttcaggggcattgctgccataaactgatgctacctgatacgcttgctctgggataccaccgcctcactctgatacaaggaagccaatgctggtctatgcagattatcgtggcccccaaacgctgctatgaacccgatgctctactaaggagagaaaaactttggggtgcctgtgtgcaactctatactctgcgttcagaaaacaactggggaattggcgattttggcgacctgaaacacatgctgaaagagatagcaatacgcggtggggccttcatcgggctaaatccattgcatgcgctatatccgaccataccagaaagcgccagtccctatagcccctcttcacgcaactggcttaatgtgatttacattgatattaatcaggttgaagatttcaaacacaatgaagaagcacagagatggtggcaaacagcgacgactcaacgcatgttacaggatgcccgtaacgcggaatgggtagattacaccacagttatggcgttgaaaatggcagcactacgtctggcatatcaacaattcagcactcgtccagaacatgatccgtcaaaaaccgctttccaccaatttgtcatccaaggtggtgaatgtctctactatcaagctgtctatgacgctctgcattgccggttatatgctgaaaatagtacctattggggctggccggtatggccggaaaagtaccgcgatccgcacggtgaagcggtacaaacattttgccaatctcacccgcaggaagtggaatttttcctctggctacaatggctggccgatactcagcttgcagactgctttacccaaagccaaacaagtggcatgcccattggaatttaccgtgatttggccgtcggcgtagcggaaggaggctcggaaacctggtgcaaccgggttgtttactgcaccaaagcatcagtgggagcaccaccagatgcactgggcccactaggtcaaaactggggcttaccaccaatgaatcctcatgttttgcaatctcaagcttaccagccgttcattaagctgctgcgcacaaatatgacttactgcggtgcgctacgcattgaccacgttatgtcgatgcttaggctttggtggattccctatggcgaaacggccgacaaaggagcatatgtacactatccagttgatgatctaatggcgattctggcattagaaagtcaacgccatcgctgtctggtcattggtgaagatttgggtattgtaccggaagagattgtgggcaagctgcgcgatagcggtgtctattcttataaagtgctctactttgagcgtcacggcaatggggaataccgcgcacctgaggattacccgatacaagcaatggcgaccatcaccacccatgatttacctactttacgtggattctggcaaagcgccgatttgacacttggggaatcactcaagttatatcctgataaaaacctgcttcaagggttatataccgaacgtcaagctagcaaacaagggttattagaaggcttacatcgctacggctgtatcccggaacatatcggtgacacggcaaaagaggttggaatgtcaccgatgataaaccaagggttacatcgctatattgcccacagtgcctgctcactactgggactgcaacccgaagattggctggatatggataaacctgtcaatattccaggtacggtaatggaataccctaactggcggcgaaaactgaataccacattggaaaccctgtttggtgatgatcatgtcaatcaattgctgaaagatgtagataaatgccgtaaaaaagcaggaacagccagaggttaaataccgtaacgcctatttctcctgtacaggcattattctttccagtttaaaggatggttttaatctataccctatggatttcaagatgcatcgcgacggcaagggagcgaatccccgggagcatagagaacaatgtgaccggggtgaacgagcgcagccaacaaagaggcaacttgaaagataacggatatataaaccatccttcatattgctgatttttaacgccttgactatcaccgctgagttttcaccaatgataaatacaggtgttaagaaaagccgctttttgtctgtcagtatggttttaaaaactggaaaagaggccaagcgaacctcggaaaaaacaagtaaaaactttaatcatcaaaagtaaaaagcagtgattaataaggcttttttaaagtgggtaaaaaatccgataccatactgatattagaagagaaaacattagaaaaaacaggttttaaattgattaaataaggtaaaaaaaataacagcgttaacccgataacaagaatatatcctagcaaagcatttaacagtattaaccacattaacagctttaacagctttaacagctttaacagctttaacagctttaacagctttaacagctttaacagctttaacagctttaacagctttaacagctttaacagctttaacagctttaacagctttaacagctttaacagctttaacagctttaacagctttaacagctttaacagctttaacagtattaaaccaattctcttaaataaaagatttttcctgactgcaacaagtttacgaaaaatcagagactataattgtagaaaaccgagaagcatccccgaaaaagcaagagtatttaacaacattaaaaataattaaaaaaattggcattaactttaatactgttagctatctgccacccccactggttttaaatctaaaaaatcaaatatagaaaaaggagaaacgagaaaacctaaatatcattttaatgaaaacaaggacattaaatgcggttcagaaaatgtaaaagctattaaactcaccacaattaagcaataaaaaccgttcgttacaacaggtttccaattaaaaacaagcaccccatcagaatgaaaaccacagtacaagcttatcatatttttaacattacttttttaacttacatttctcttttaccggtgattaatcaactaaggattaaaaaataggtagtaaataacttttcaaaatagtagaacacttggagggaactcagtccaatttttgcaatctgatcaattgtagataatcccaaaccactaaacggactgagttatgcctatcatagcacctataccccgcaatgaacgacgccagatgaaaaaaattatccagaacacccgagataaagattatgctcgcaggctcatggccatattgatgctgcatcgaggcgagtctgtctctctggtcgccaaaaccctttgcgccagtcgttcttctgtctatcgctggataaactggttgactttatatggtctggaaggactcaaaagcctgcctgtgggcagacccgctgtctggaatttaatcccgctttatcctttactgtcttttttattgcaatattctccccagcaattgggctgcctgcgttctcgctggagtcttgagttttttataattaaaatcaatgaattattaaacataaaattatccatcagtaccttctatcgttacttacataaaatgggtatcgtgtggcgaagggcagccccgacgcttaaattacccgatcccgagtaccatgaaaaaatggcgaaaattaccgaggcattgtcaacgtgttcagaaaaacatcccgttttttatgaagatgaagtcgacatcgagctgaatccaaaaatcggggctgactggtatttaaaagggcaacagaaacgtatagtgacaccaggaaaaaaccaaaaacattattttgcaggttgcctgaatgttcaaacgggaaaagtgacttatgctgacgggttaaataagaattctcagttatttatcaatgtattggaagaacttgaacgccagtattgtcatgctgaaaccctcactttgattttggataattacagtatccataaaagccgacgggtcagagattggctggcttgtcatcctaaatttaatctgttgtttttacctgtttattcaccctggctgaataaaattgagcgtctgtggcaatccttacatgaaacggtgacacgaaatcatggctgtcagtatatgtggcaattgcttgagaaagtgaaaacgtttttaaattcatgtccctacaggaatagcagagaataaaaagagtgagtgtattataattatgaaaagttatttacactgataacaacttttcaaaaggcataaagtgactaaaaacaacctattctccgctatgtttaatccatttatcggtaaatcggtaatacatactatcctccacttattttacatttacctaaccagtcatgattatttaaaaagacaaacagggagagattaaacatttcactcaacagactgatttaacacaacgaatcaaagatttcagtagtgtgattaatgacatttagtcgaaattcactaaccattaaccgagggttgaaaagcaataatcacgtaaaataacattaatagaataaactgacattcaagtattttctcactatcattttgcgaagcaatcaataaaaatgcgattaaagaaaagataaaacgattaatttagctgaatttaagcactaaaaaggatttatcctaaaaaaacattaatggtatctccatactagaaaactatttattattgatttaataaagaaaaaaacaaagggggatgattcataaaaacccacagaattgccagtaaaaccaattggtaaaacaatgccagtaaaacagtgtcagtaaaaataaatcggatatgattaatgttcgtttaaacgtaaaaccacgatatacccgtcatctttcaagttgcctctttgttggctgcactcgttcaccccggtcacatagttatctatgctcccggggattctctcccttgccgtcgcgatgcatcttgaaatccatagggtatatatcataatgtttaaatttagcaaaaagcagatatccaaaagataaaaaacgattaaaaccagataccgattaaaatcatccgttaaaaaaacaacttttaatcacagtttaaaacctgctctggttttatgggtatttcaattaaaggctttagcatttgatagttatgaccgtacctttaatcgacaagcgccagtcgggcaaccacaattaacaagatgcccctccagcgcgacaggtattccttgtatattaaacaagttagaaccttccgcaacaacgccggtttgtttacaggcgggacaaaacaccggggcacctttacaggcaaccgataggtgttggtttaccaaatcggaaccctttaaaacctcacctccggttgttgtggtatcacctttaaggataacttttttactttccactacactgcgcattatttactccgttgtattttccgtttctcgtattaaatgccatacagttgtgcccggttctgcaccttcaacatcaaaagccatcgcaccctgagcaaagaaatactgcctgcccggcaggctgtcagtttgccagatcccgctgaccagtgccggatggtcacctctcaaaggggtcacttgtagcggtccccggtcataacgggcataccaagccagggtggaagttgaattaaaatgaccttcaccatagaagtgcaatgaatggccttcacaaggtatcacccgtatcggacgtatcagttggttaatggcaaaataactctccgggacactgcccggtagtggcgttaagtccgggtattgaccggcgcggatcatcagaccattggaataaggcgtaatcactacatcccggtagcggcgcagtacatgatgtatccagaattccccgcccagtcggtttacaaagcgtttggacagcagggtgatccagttaatgctccggatggaatgcccatactgtaatttagctgtgaacactgcggagttaacttgcaaggaagggtaacgttgcgccagttgatactctaaaggaaagtagtcatagaagtcattgggtaagaccagacagtagccacagtccccactatccggttcaagttgttcacacaaaaactccagccaggccataaaacgagccatgccctcttgttctttcagataattccaaggaagtgccaggcttaggtaagaactgccgttatcaccgcttatttcccgggaatccagataacgcatcagataatgaggtgcctcatcttcatttttggcatcactgaccacccaaccagaaaactggttttttttctgattaagaataccctcttccactttagcaatattttccggtgaatatttttttagcctttccagctcatgacggtgaaaacgcaagtgagagccaaactcttcccgaaaacgctggtagcaggccagaatgcgttgttttttcgcctgggtgtaaccctgtttaaaaaacaaggtgatagaaatccccagacgggaaacggtcagtccatcgccattacgaaaaagaaaagaggtcagttgtgatctcagttgggcaaagtaatctacagtttccatcattttctccgtgagtgatgagtcggtggataatttgttattcccacatacttgccgcttcccgtaccagatgccagagggttgtgcccgtctctgcaccttcaacatcaaaagccatcaccccctgagcaaagaaatactgcctgcccggcaggctgtcggtttgccagatcccactgaccagtgctggatggtcacctttcaaaggtgtcacttgtagcggtccccggtcataacgggcataccaagccagtgtggaaatatcatcaaaatgaccttcaccataaaagtgcagggaatggccttcacggggaatgactcgtattgggcgtatcagttggttaatagcaaaataactctccgggacactgcccgggagtggcgttaagtccgggtattgaccggcccggataatcaggccatcacggtaagaagtaatcaccacatcccggtaggggcgcagcacctgacgtatccagaattctccacccagtcggtttacaaatcgtttggacagcagggtgatccaattaatgccacggatggaatgcccatactgtaatttggctgtatgaaccgcagaattaacctgcaatgaagggtaacgttgcgctagctggtactctaagggaaagtagtcatggtaatctctgggcagcaccagacagtagccacagtccccactatccggttcgagttgttcacacagaaactctaaccaggccataaaccgggtcatgccctcttgttcttttagataatcccagggcagcaccagactcaggtaggagctactgttgtcaccatcagcttcatcggaatccagataatgcatcagatagcggggagcttcatagatatttttggcgtcactgatatcccaagtagaaagctggttttttttctgattaagaataccttcttccactttagcaatattttctggagaatatttttttagccctttcaatgaatgacgatgaaaacgcaggtaggtaccaaattcttcgcgaaagcgccggtagcaggccagaatgcgctgttttttctcctgggtatagccttgtttaaaaaacagggtgatagaaatcccaagacgagaaacagtcagcccatcgccattgaggaaggtaaacgcggccagttgtgatttcaactgggcaaagtaatctacagtttccatcattttctccgtgagtgatgaatcggtggataatctgttattcccacatacttgccgcttcccgtaccagatgccagatagttgtacccgtctctgcaccttcaacatcaaaagccatcgccccctgagcaaagaaatactgcctgcccggcaggctgtcggtttgccagatcccactgaccagtgctggatggtcacctttcaaaggtgtcacttgtagcggtccccggtcataacgggcataccaggccagggtagaagttgaattaaaatgaccttcaccatagaagtgcaatgaatggccttcacgaggtatcacccgtatcggacgtatcagttggttaatagcaaaataactctccgggacactacccggtagtggcgttaaatccgggtattcaccggcccggataatcaggccattggaataagaactaatcaccacatcccggtaggggcgcagcacatgacgtatccagtattccccacccagtcggtttacaaaacgtttggacagcagggtgatccagttaatgccccggatggagtgttcatactgtaatttagctgtatgaactgcggagttcacttgcaaggaagggtaacgttgtgccagttggtactctaaaggaaaatagtcatagtaatctttgggcaggaccagacagtaaccacagtcaccactgtccggttcaagctgttcacacagaaaatccagccaggccataaaccgggtcatgccctcttgttctttcagataatcccagggcagcaccagactcagataggagctactatcgtcaccatcatcctcatcagaatccagataacgcatcagataacgaggtgcctcatcttcatttttagcattactaacaacccaaccacaaagccgattttttttcctggcgagaatgccttcctctatcttaataatattttccggtgaatatttgcttaaccctttcagtgaatgactgtgaaaacgcaggtgagtaccaaactcttcgcgaaaatgccggtagcaagccagaatgcgttgctttttctctagggtgtaaccctgtttaaaaaacagagtaatcgagaggccaagacgggaaacggtcagctcatcagcattggtaaaaagaaaagaggtcagttgtgatctcaactgggcaaagtaatctaaagtttccatattttctctccgttaattatgaagcggtggcgaatgtcacactcgccaatattgctaggacggcggctaacgcggcggcgctaactgcggcagcggcagctaaaatttccaccagtgcaatcagtgcggcagcgacggcaagggtgacaaggataacaacggcaactccggcaacaatcaccaccatttccagcatgccttcccccacctcttttgatatctgcatccagctaatgtttttaagctcttccagggtgacgtctgaaccctgttgcaccgtctgccaccgggcttttatctcactctccgtccaagtcacgatttttcccgtttgttcattagcccaggaaaaagcgtagctgacctgatggcttatcgggtcaataatctcttcacacacccacttgccggtttgattgagccatgaaccaaattgggcaagaagctcccgagtactgtcgcggacataattcaacccattttcggccagacccgccacctcctgcccgaggacgacccagtcttcatagctgggtaaaaacgaccagcgggaagtgctgagaagcggtggattttttgtcaagggttgcggaatggtccccggcacaccctctgcgggcggtacgggtaaagcttcatcatcaggcggcgaaccgggcggcagcggggccagtgggatcggatttttatagtgttgggaaccgggctgataaagttttcgccacgcttcgtcatactgtttttgctcttctgtacggttatcgtcgacacgcatcaccccaaagcggtcttcggtcgcaatttggatgtaatctatttcttgatcttcggcaagtttatcgcccggaaatttcacctcaatcaacatctttagattatcagggtgcacagaatcatcgaagtaggtggcatttctgcccggccagcggagagcttcatctttaactagaataatatcgggacgccgaatacgtttaacaccaaattcctccgcgtcttcggcagaaggccgggcaaacggattactggattgcggtaagttatcgctataacgctgtttagaggccagactggtcgccagcatgggcagaggaacatccttcttcccccggatagcaaacaccacttctgctttatagggccacagaaagtcatgcttaagctcctcaaccttaatcaacccactcataatgacttgattaagaaagcgaatagcgcccagtttggtcataatcattgccggcaggcgcagggcatattcagctttttccgccagatagcaagggtcttcatcggcgggaaagacgccgatttccatcgtacagttaattgaggtcacggccggacacattttaccactattagatattgccatacttatttctccgtaaattccataacatgctctaccggtgtgttatcactggcctgatataaggtttgcttcggtttcggtgggttttctggtgaactcagttgcaaattttcttccgcctcactctgtacaatcaccgttctgcccaacgcatcggttttaccggaaagggtctgaccgccagcggtggtaatggtatagcgggtatgggccagtggtttaccgctctgttcactgagcagggtatagcgggcggagtagtcaaacagcgcaccggcggatttcttgccggtgatatggtcagtcatggtgatgctgaccccttcgatgcggatattgcccatcgggtcaataactatctgtccgcctgcgttcccaatgatgatttgcccgctttcagagtgcaccgtgatatgtttacccacggtaatttgctggttatcggcgatgtttaattgatggcttttaccaatggaaagggcttgctgacctttaatggtcaccgtttgattttgaccgacttcaagcgtctggccgccctgcacggcttcatcatcatcgtttttaattatcgcggtgcggttatgcgccacttctgtttgctggtcatggcctatctgcgtggttttgtcccggagaatctggctattcatatccctctgagcatgaataaacacttcctcgcttcctttattatcctcaaagcgcagttcattaaatccctctcctccgtgagtccgggttttaaaagtggtacgggttttctccgccggtaaattaagaggcgggcggttgaggccattataggtacaccccgtcacaatcgggcggtcgatatcgccgttgagatagctgacaatcacctcctgcccgacgcgcggtatcgccataaaaccgaaaccgttgccgttccagccttgtgccacccgtacccaacaagacgcgttgtcgtccgctttatcgtaacggttccagtggaaatggatccgtatcgcgccgtgttcgttcacataaatctcttcgcttcccaccccgaccaccgtggcgacttcatcaccgtccgccagcggtttgtagcggtaaggcggccgccagtcctggtttccgggaataaaggcgacctcgttggtcagtgttgtgccttcacccccgtcgtctgatgcgacaggttgccacccatgatgcgtgacagagattaactgccagcgggcgttcatggcttctatgggatgggattgcagggtaaaaatcttgcccggccgcagccggatgcagttggttttggcggtaccgactttactgtagtttcgtaactgttccagccgcagttgggtaaaaggttttccttcctcgtcccactggaaacgcccgtaactttcaaacaccgaatggtgcccgctatcgtcggattgcttctgatgctcaagcgaatatttggggttaagaaagttatggtctttctggaccgtgccattcgaacacaggtattcgccatagctccactggtacgccgtggtatcggtctcgtccgtttcaggatgcgtattgtaagtcagagcgatatccgcctgcatgcccaagtggcaatcacagaacaacgtctgttcttcctcaaaccagaagataatgccctcttccgccgccagccggcaccagaaatcataagcggattcgcgtttttgcgtggtgtattcccgttcggcatggcgtttatagagcgtatcgcgggtaaataaaatacgatgatctttaagcaagatcgttaagatttcgggtacagacttcagatggaaaatacggctatcctgattgagcgtcatcagccacattgtggggcggacagtgaaaatataaaaagtgctacgaccatcggtattaccctgttcagccccggttattaaaccattaatggtccgttcggtgacgccattgcgggtaatggtcagtgacgcgctgtcccccagttgttcattcaggggaatgtcatcacgtgagctcaccacctttaacgtcaggcgataaagctgtgacagctcttcctgtaaagtaaattgcgctacctgaaaggtggtttggggcagtgcgccaattcggcaggtgaaaactaatccatccatatttgaaaccctacataattgaaccattatcctgaaacggggataacgcaagaggctattaaacgagccatgacatgcggctcttttaaatagcgccggtctgttccgcggtaaaaaaatgacagcgtaaaatagccatcatttaatacgtggcgttagagagaacaatagaccgcgtccagctaggtaggatggagtggagacaaataacagagaatttcgctctctaaatattatgaccacaagatcatgatatttatcatatggacataaaaaaatgtgataaatatcacatgaaatggctcattaatcgctatcaatatatacccatcatctttcaagttgcctctttgttggctgcactcgctccccccagtcacatcgttctctatgctcccggggatttgctcccggggattcgctcccttgccgccgcgatgcatctttatatgtaaagtgaatttaaaatcaaccaggctgacacctcatcgacattcctctcctgccttatatcggctggagtgccttttcgaggtaaagatggtttgtagtgtgaaccctctttcaaccacgtttgtctgaccaataactactctactgcaaaaaatagcaaataaaataacccaatgggataggcagtaagttgctgaatgagataggatcttgacctgctaaacactaaattaaccttaccaatctattaccaataagaaggcattatgtggttttccagatttaaactggcttttatcgcacttttacttccctggttgctaacggtagcaacacaaatggcgggaagaatctatcttctcttaacttatggcagttatcagctcttcattgactctactcaagacgtggaacgaatgttctggatcggcggattgtttgatattcgtattgccagtctgctgtttgtgccttgtctgctgattgctagcttatttgccattaataaaaacagcttcaacatatggcaacacgcctatccgtggttggcaacaacactcaataccgtagtcggggctttgacggtaagtaatgtttactactatgccacttatgaacggtcgttcgatattttcatcttcggcttagtggaagatgatacgcaagccgtgctgcacaccctatggaacgactatccggtgattgaaagtttgctctgtttagcgctgttcgcaatgactgttttctggtcctgtctgctctggcaacgctaccttatttcacgcacagagcgcaaaaccagtctgccggtttctgcgatggcgacgctggttattttgactgtctgtttcattggcatgcgtggctccataggcacctttccactacgtcagtccaatacacaagtttcagaagtcaaaatgcttaatatgctgacacctaatggcccaatggcactgaattgggcgtttaatgatcattacaaaaacagccacttcccagaagcaacagatgcacaaggtagctggttattaaaccattttctagagaagccaacccccgcaaatctgtcaccgtttatggctaaaactgccgataatcccaccgctcaaaaaaatccgcctcatgtaatatttaacgtcatggagagtatgggttatcacctacaaagtttggatcgcccagatcttgatgtttttggcgctctacgccagcactggcaaaacgactggcgttttgaacgtttcatttctgaaggagatggcaccattgatagtttaagccgtttcttgatccgcagcccaaacagcgcagtcagtcaatccaccgcgcagcatctcgatttcaccagcaatatgttcaaaccctatctggcgaatggttacaaaattatcttcgtcacatccggtaacggcgcatggcgtaatttgaatcagttcctgccaaacctgggagtcagtgaatttatcgatcaaaatgggctgaaaaaacgctatccagaagccaaattcgatacctggggtgtacctgatgagtttatgttccgttatattgaagagcgcttaactcaggcagaaaagaacggggagcatgttctgattatgtcgttatctactactcatcacccaccgtataaatcgccggcaggttatcagaaaaccgacatcaagctgagtgataccgagaaacaacgtttaagtcatttggctagtggtagtgagttacaagaggtttttcataccctgcgttacgccaatgatcaattaggacaatttattagttgggtaaaatctcagtcattggcttcccataccattattgcggcaaccggtgaccataatattcgaggtatcagttatccagatgctcatgagttggcaatcggccacggtgtaccgttttatctctacgtgccgcccgcttatcgccaaaacgcaacttttgatgctaccagagtcggcagtcataaagacatttggccaaccctctaccatttgagcttgtcacatacagcttattaccgtaccggctgtaatttgctggctgaacatctagaccctatctggtgtcaaggatataacccggaagtcactattacacagcaaggagcttatgtcatgataggcaaaggtgaatttcgaccgtgggcaaatcaaacaggattattactcggtgacccccagccaatgacagcagaccaaaccaaacagttcaaacgttggcaggcatttaccgatctcctgtcatggcaattaaatcgtcaagttcaccaccagcaataattgatacttccgtgaatccctttaatctcaatatattaaagggattcacattgagaatattgcgattagccttttactcccccggcggtcaaaccactgaccaaccagcgctgagcaaccaagaagacgatggtaatcgggagtgccgagagcacagcagcggcggcaaaatctccccaaagatagttctgtgggttaaggtactgctgcatgcccaccgccaaagtgtaattgttcacatctcgcaaaagcagtgaggcaacaggcacttccgtaatcacaccaatgaaggaaagaatgaataccactgccagaatcggtaccgaaagcggtagcagcaccatacggaaagcttgccacggtgtcgcaccatcaagcgcggcagcctcttccaaggagccatcaatggtttcgaaataacctttaatcgtccagacatgcaacgcaatgccccccaagtaagcaaaaatcacaccaccgtgggtattaaggccaataaacggtacatattcccctagtcgatcaaacaaagcatacagcgccaccaaggaaagtaccgccgggaacatctgaaaaatgagcatgcctttcagtaaagtacttttaccgcgaaaatgcatacgggcaaaagcataagcacaagtcgttgataaggtaacgatacctacagcggtaataaaggccaccttaacagagttccagagccatagcataaccgggaaaggtggcggagtaacacggccatccggtgataccacactgtaacccagtgccaatttccaatgttcccaagagatattttccgggatcaaactccccgtagcaaagttccccggccgcagggagatagtaataaccatcagtagagggaataagatcatggcaataaaggtaaacatcaacaaatgtgtcgctaacaaacgccatttctgtgatttgggttgaaccattgccattgcattccttccttagtcaaatttaatacgggtagctttcaggttaataaccgccagtgcaccaaccaacaaaaagatcactgtcgcaatcgccgcagccaagccaaagtcctgcccactactgccgtcgaaagcaatacggtaggtgtaactcaccagtaaatcggtatagcctgccggcgtcgtggtgccaatgcgatctggtccaccaagggttaacaactgaatcagaacaaagttgttaaagttaaaggcaaagctggcaatcatcagcggcgtcaatggttttatcaacaacgggaaagtaatcttaaaaaagttctgaaacggccctgcaccatccattgccgatgcttcatacagatcatcgggtattgctttcaataaccccatgcagaggatcatcatgtagggatatccaagccaggcattcactacaatcagcatggttcgcgccatcgttggatcggtaaaccaagccggtttaagaccgaatagaccgttaagcaacagattgatctcaccaaaactttggttaaacaaccccttgaaaatcaaaatagaaataaacgatggtactgcatagggtaagatcaacaacacgcgataaacagcacgacctttcagcgcttcccactgcacgatgcaagccaaaaccatgccaacagcaactgtcagcaccacagtgaacagagaaaacacaactgtccaaacgaaaatagcgaggaatggtttctgaataccttcatcctgtatcacccgcaggaaatttttccagccgatggtaacagtaaatcctggcgtcaaagtctcattaccccatgttccctcagcattgacagactgatagaaaccggtatcggtattggggcgataaagcgtacctgtttgattgtcggtgagggactcaccatcttccccaagagagtattgagggtgcactccagagaattgacgtagcgaactcattttcagccggttaccatccggtaaaacaacaaccaactggttcaatgcctgtcgattctgggtaataatgcgcaatgtcgctgcttcaccgttctcaagattatcctgctcatacacatgcagagtcgtctcttccattgctgacagcgaaaacggttcggacactagttgcttcgtttggctcggtatactcagtgccaaaacccacaaatccgattttggatagagcttaaaagtcaatgcttgccctgactgatactgacggctcatcaggacagattgtgcgcgttcaaaagtcagttgattgatactactatagttggtgaaggcgatagcaatggtgcaaatgagtggaaacagtacaaacaatcccatgcctgccacacccggataggtatagcgccaggcataagtattgcggttggaaaaaacataaatccccatacctaacaataccagtgtcaccattgcaaacagatactctccctgtgagtacatcaataccaccagataaccggtaaagagtacacacaggctcactgcaagccatttcagagcagaatgctgccaccatgatgttttttcgagcgtcgctgacataatgctcttcctttttactacgacgtaacagctttgcggatagcttaatcaatcttcctgcaaacaggcatccttactggttgcaggaaagagaactccttcaaaaaagagttctcacaggttacttagttatacgggcttcggcatcacttagtgcggcatcaacggtctgacggccagccaacgcattaacaatagcgttgcgcatggcataccaaaaactgctcatttgtgagacgttcggcatgatttcgccgtttttagcattttccatcgtggctgcaatacgtgggtccttagccagaatatcgtgataggatttcaatgacacagcccccaacggcttatctttattcaccatctccagaccttcgttggtcagcaagtagttttccaagaactctttggctagctctttattcgggctggcagtattgatacctgccgtcaatacaccaacaaacggcttggacggatgaccgttaaaggtcggcaacaatgccacaccgtaatttaccttgctcttgtcgatgttggcccacgcccacggaccgttgatggtcatcgccgtttcacctttgttgaacgccgcctcagcaatggaatagtcagtatctatatttagatgcttatttctcaccaaatcgataatgaaacgcaggcctgatttggcacccgtattattcactccggcattcttcacatcatatgcgccattttccagcttgaaagcatatcctccgtccgcagcaatcaacggccaagagaaatatggctcttgcagattaaacataatggcacttttgcctttactcttcagcgccttatccagagccgggatctcttcccacgtttttggtggtgtcttcaccaagtctttattgtagataagagagagggcttcaaccgcgatagggtaaccaaccagtttaccgtcgtaacgcacagcatcccaggtaaacggaaatagcttatctttgaagctcggatctggcgtgatttctgtcaccagaccagactgtgcatagccgccaaagcgatcatgagcccagaaaataatatccggcccatcgccggttgctgcaacctgtgaatacttctctgcaagcttgtctggatgctcaaccgtaacattgacacccgtatctttctcaaacttctcaccaacttgtgccaggccattgtagcctttatcaccgttgatccagataactagcttaccttcctctatttttgcaaaagcagaggcagataacaccagcgtggctaaaacagaaagcgctaaagtacgggcgcctacttttaaggttgtttttatcatcattccgtccttatagtttaagtaggttcagagtgaactgttttgttacattggcggagagtgctgatctagtgtgcaattaacaatggaaatactcatcctcccctactctacgccctgcccggaatgggtgtgatctctattacaaaaacagaagaagcgtgccgttgcccacaaaaaggggcatctttttttgcgataaatatcacaatttatccagtagctcatacctaaccagctcaacaacgcttatctcatcctcctaactcctcccccataaaaaatttgggtatggaggatttactcacccgtcatcttaaacacactctgggttattatttttcaccgcgaattgcggtgataagtccgggggaacacatgtcgagcgtcacattacataatgtatcgaaggcttatggtgaaactattatttccaagaacatcaaccttgagatacaagaaggagaatttatcgtttttgtcggtccatcgggttgtggaaaatcgacaatattaaggatgattgcgggtctggaagatgtgacttccggtgatttgctgatcaataacatccgaatgaacgatgtgccccccgccaaacgcggcgttgggatggtttttcagtcttatgcactgtatccccacctgtctgttgcagacaatatgtcattcggcatgaagctggcgggcgctaaaaaaagtgatattcagcaacgggtaaaacaaattgccgagatgcttcaactcgctcacctgcttgatcgccgccctaaagccctatcaggtgggcaacgtcaacgcgttgctattggccgtactctggtagctgaacccagtgtttttctgttagacgaaccgctttccaatctggacgccgcactgcgggtccaaatgcgcattgaaatctcacgcctacacaaacgattgcaacgtacgatgatttatgtcacccacgatcaggttgaagcgatgacgctggccgacagaatcgtggtactggatggtggagatgttgcccagattggcaaacctcttgaactttaccattacccggttaatcgctttgttgccagctttattggttcacccaaaatgaatttcctgccagttaaagtcacggctaccgctattgatcaggtacagattactctgcccaaccgacagcaaatctggctgcccgtagaaagcaagggggtaaaagtaggcagtaatgtctctctggggatacgtcctgaacacctcctgccaagtgatatcgctgatgtcacgttggaaggcatagtgcaagttgtcgagcagttaggaaatgaaacccaggttcacattgaaatcccggccattcatcagaatctggtttatcgccagcctgatgttgtactggtggaagaaggatctaccttcaccatcggattacctccccaccgctgccatttattccgagaagacggaaccgcatgccagcgtctgcatgaagaacccggtgtttaagcctgagctaatcaaaaaacgacaggagaataattgatgaaatcaatgcgtatattacctatctcactaaccattatggccggattactgtctatcgaggcgtcagccgtagaattccacggttacgcccgttctggtattggttggaccggcagcggcggtgagcaacagtgtttccaaagcaccggcgcacagagcaaataccgtttaggtaatgaatgtgaaacctatgctgagcttaagctaggtcaagaactatggaaggacggtaataagagtttctacttcgataccaacgtggcgtattccgtggcgcaaaaaaatgattgggaatccaccgaccctgcgttccgtgaggtgaatgttcaagcgaagaacgtcatcgattggttaccgggttcaacattgtgggcaggtaaacgcttctaccagcgccatgacgtacatatgattgacttctactactgggatatctctggtccgggtgcaggcctgcaagatattgatctcggctttagtaagctcgcgctggccgtcacccgtaacactgaatctggtggttcttatggctggattgctagtcagcgcaaagaaattcccacctccaatgatgtctacgatatacgtctatccggtctggaagttaacccaggcggcaatctggagcttggttttgactatggacgcgccaacgcgcgagatcactacaaacttgaccgtcatgcttccaaagatggtttcatgtttaccgccgaacatacacagagcatgttaggaggcttcaacaaatttgtcgtacagtacgcgacagattccatgacctcctccaacagtggtcattctgaaggtgccagcgtaaacaatgacggttatatgttacgtattctgaatcatggcgcgattaatctcgcagaaaaatgggatctcatgtacgtagcgatgtatcaggatactgaccgtgacaacaacaatggcaacacatggtatacggttggtgtacgtccaatgtacaaatggacatcgacgatgagcaccctgctggacattggttatgataacgtcaaatcccaacgtactcatgacaccaatgatcagtacaaaatcaccctagcccaacaatggcaggcaggtgacagcatttggtcgcgcccggccattcgcctgttcgccacctatgcaaaatggaatgaaaaatggggtaatgcgaacaaaaaagacggttacatcgatggaatggcctaccgtgataccgcaacgcataaattcagccgtggcgacgatgatgaatttacctttggtgcacaattcgaagcttggtggtaatccggttacaacgatttgatctcagatcaatcaaatgatttgtaatggttaacgccttttataccctatggatttcaagatacatcgcggcggcaagggaacgaatccccgggatcatagcaaactatgtgaccggggtgagtgagtgcagccaacaaagaggcaacttgaaagataacgggtatagactgatatgcctcttgaccgtgggcatcagtctctttttttcaaccgaacaagggtaagagatgaaaactaaactgctctcatgttgccttagcgcggtactctgtagcacatttcctcttataggatatgcaacgcccattaccgcaactcaagcaactatcacagctaaaacaaccacaaaacaggatattgtcgccccgtccctctcgataacagcattgcaaaaactgagctggcaaccgattaataccagtgatactcaaaccattatcctcaatgcagcatctcagcatcttaatgagggagagattcaggggccgatagccgcattcgcgctgccggcaaaccggggctctttggatattaccctgagcagcttagtacaagataaacaagtttacgtgccaaatgttttagtcctggatcaagggttacgccccgccgcattttacccgagcagttattttccctatgaacgtccgggggttatgtccaccgatcggctggaaggcacactaaagctaacaccagcactggggcaacaacaaatttatgtactggtctacaccacccgtaccgatttgcagaaatccacccaaatggttgatccggccaaagcttacgcgcaaggcgtcggtaatgccgttcccgcgattcccgatcccgttgcccgccacacacaaaccggtacgttgaagctgaaagtgagatcggaacaaaacgccagcaacatcacgattggtcaagtcttctcaagtccagcacaagaaccgatcattgtcgggccaacacaagccatcgtaacgccgtctacgctgcaaaaagtcaaaccagtcctgagtgatacagaacgttatttcagtgatgcaattaaaaaagaaattagcaatggcaatatcgataaggcactcaaattgctggatgaagcggagcgccttggatcttcaacggcacgagaaacatttatcaacagtatcaaaaacaaagggtaaacaaatgctctccgaagaggagggcatcaggtttaactcctttttacacacatcccccggaaatggtttttttgtatacaaataattgttatgatgagtatctacacacaaaacaccctttaaagggattttacagtagagataacacaatggatatgctcacagcaattaacaaattagatgaattcagcaaaatgggaagagccgttttccttttacaggatttggaagtcatctttgctgacgagacttctcgaacattgcaaaaatctattgatcgcctcatcaaagccggactgttacttcgcattaccaaaggggtttatgtctatacgcgggccagcataggaagctatcccttggagactatcgccaaaaatatccgacgaggcgaatataattacatcagcctggagtcagctttatctcaatatgggttcatctcacaaatcccaatcgaccgcctgacaatcatgtctactggcagagctggagagtttaaaacaccgtggggagtcattgaaatcacccacaccagcagagagcctagcgaaattctgaaggcaacattagaaagccgtggccccctgcgtatcgcaaaaaaagagactgctctgcgtgaccaaaaaagagtggggaggaatatgcatttagttcaactagaggaactcaactatgtctagccacgttaactttaacgccattgttgatgaagtcattgaacaagacagactggcaaacctgaggccagttgtagaaaaagaactgttgcattatgacatcctgttttgtctttctaaggacggtttactcaaggagattacctttcagggtggtacatcgctaaggctctgctacggctctaaccgatttagcgaagatctggattttgctggtgggcgtggtttctgttccgctgatttgagtagaatcaaagagtgtatcgagaaatacctgggtgtacgatatgggcttgaggtcacggtaaaggaaccgaatgaactacgaaacaaaccggagtatgcagaagtaaaagtggataaatggcaaatatccgtcactactgcgcctgaacgtaaagacctgccaaaacagcgcataaaaatagaaatcgccaatattcctgcctatacaaacaccccccgttcattgataagaaattattcagtgttacccgacggatatgctgatctccttgtgtctgtcgaaaccctgcctgaaatcatggccgataagctgatagcattccctgctactacatctcaaattcgataccgcgatatgtgggatttattatggttaagtcagcaaaatacgacaccagacatagaactcattaaaagaaaagtatcagattatcagcttgataactttgaggaattgcttcaagccagaatcgactcgattgaaattattgttgcttctggtcactttcacaacgagatgagacgatttatacccgcacctatatacgacagaagtgtaggacaagaagcattttccacctatttaacgacgagcctaaaggagttgttaaccactgtgaagaaaagcctgtattcttcaggagacaactccattccattcaagttataacgattacatgtattttatggctgctctggtgccctagattaaaataccgcattgctgccactgagccgtttgcaatgaatgcgacttaagggttccttctatttcctttgtttgttgaatcaatatcagccagtattcatagagttgtttcaaaaccctgcatgcaatagcagttaatcattatttacatcctcaagtgcttcaggcagcagagcgttgcggaaaaacgatgccatattctgctgccaatcctccgatttgactagagatagatagcaacgcgtttttgaactaataactgtcgtacattagatctgagctaatacaggtaaagccttagtgattcttaacaggaaattatcttcataaagaaaggcaatagaattttttattgcttgatgatctcttattttatattcgtcaataatgagttgtaatttttcagacaactcaggaatactacctgatttataaagttcaccattaaaatcattgataatatcacccgggccacattgacaatctgaacttatacaatagataccataagatattgcttccgctaataccatgccaaagccttcatattttgaggttaaaataaaagcggacacctcttttatattatccatcacaaattcccaaggctgatttttccaaccgtgccaaataatattgttacttatattaagttgtgaagataattcttttaaataaacctcatcatcaccagaacctactatatgtaactcccaatgaccatgcaattgtgaaagcgctaaaaacagttcagttagattttttgacttataggcaagaattctgccaacatataagaatctggctatgtgttttggttgaggaatgataaaagagttcatcttgataggattgaaaataagatgaagcttgtctgtttttattccaaaggataacatttgatctcttaaaccagaactaattacaaggtgctcgtcggcacagcataaatctttaattttttgtgaggtaggatttctaatggaagtatgcagccaagagtaagtttttaccgggaaattaattttttcacaggaaagtcgagcaatattacaagatgttgtgtctaaacttattaaaatctcggggtgaaatctttctaatatcaaggacagttcacatgcaatatccgggcgagattcgtcattgcttggcgttaaggagatatattgagcatgagataaccaatcacgattttcaattctatttttcttattcagagatatgaaaatgaaatcaatttcaatgttggcacggccaatcaaatttattaaattcgaacataccgtttctaccccaccatatccattcaagaaaagatcatggtatattatgaatatttttttcattaaaaatcctttatcgaattaaccaaaaacgctcttgcacttttatttcattaatagttcgatgatatttctccaatgaaattaaaatgtttgatttattatcaaatagaggttctaattgagactcataaaataggatgttttgtgctttttcttttaaatcaatatccaccaatatggcacgcttatcaaatttattatttcttaataaagcactttccaaactatcagggttaataatagggtattcacctaaaacatagggaaaatcttcataaagcaatatcttaaacttacgtgaaccttttatattaggtacaagattatttattatgatatggtctacatgtcgacctatccccaaaggggcatagatataatcaggttgataatttaacaatattttgtcaattagctcttgagccatatcggatgcatcatctgatttatgtatctggccagtataaatcatggccgaatttttatacataggttcaccgtattgatcggtcctgtaaatgcaatctaaaattttaccatgtattggaatcactgataatttattgcaaaaagcaatatcctcattagctcgctttgaataaagttttataaatgaatatatattatcattatgtgcagagtgtgagtaatgagatgtcaggtctttatcatattcagtaaaaaatgttaaaataatcaccttttgattttctgaaactaatttatgtattaaaccgccagcgcttaaagctgcatcatctaaatgaggtgatagaaatagatgtatcattttaaatctccatgtaaaagttattatattttatttccatcagtacaatataaatagcagcgagatcaatgcgtatcccatccctattttttataaaatctgagttatcaatgtttgaattttcttggcattgaactctttcatcatgggcataaaattctttcattatatcaaaccagccagcatggattctttttgctgcaacttctattacgctgtcactgtggcctaatattgtcattaaatcagaaaaaatagtatcgtttgtagaaagtaagctctcataattaaaattatcagacacaatattatcatcgtatgaacaagtatcttttattacttccgatataatactcaggtcactctttattaaccttttctcaaatttcttctctttttcagtgaatgcttgataaggttttaaaaaattaacctgtaagttgtactcaatttcaagttttgttattgagtcttgcatagcagttttattatcgactaaatattttgcacaccataagtcgtgtatgcaagaagcaagaatatctaagttatcatcctgctccaagaacagacatatttcagaaaataatttaatttgtgaactatttaactggcaatttaaagttttttggctaggattaaatataaatgaagcttgttttaatcttctctgaatctctttggataaatatgttgaatttaaattgattttgctatccagcagttctttgttattttctttactcatgttccatctcctattctttgttcattaatcttatttctgttgatgatatatctaagcgaaatagattttctggaatagattcaaataaaaatcgatgttcctttctaatattcatcaagtcatcgacggtatgatatttattattaaaaaaacgtccagccaccagaaatcgacaatcattattcttaattgtcataagagatttttttaatccttcctcacctccataataaatagggttattaatttcttggcataaatcagcgccaatgacaaaaattgctccctggtaaatatgcgatttttcagtaaaaattttagcgtcacttaaaactatatcacctttccccttaaattgtcttatcctctcgaaaatttcatcggttgaaatggtaagttttaccgcattcttgattgacagttcataatagggttttcttttcgtcatcgctgtagcgatttcttttaattcttcatggcctttatgcagtggattaaaagaaccagataaaattaaagtctctttccagtctatgtttgtattgttaaaatctccgtttctatcaatatggatataattcaacttaccattaattaaatcaattagataacgctcattcttgtcaggcatattcatctatattctcatatgctattgttgttaattaaatatacccgttatctttcaagttgcctctttgttggctgcactctcttgccgccgtgatgcatcttgaagtttcttgggtatatatatcgctttattatataatcacatatttattaagtgccattattatattatttaccaatggtgattaatgatatattttcactcttttaaaataaatatcaatttgatttccctagtgattgccagaccatttgttaacggtaatttatacccgtcatctttcaagttgcctctttgttggctgcactctctcaccccggtcacatagtttgctatgctcccggggattcgctcccttgccgtcgcgatgcatctggaaatccatagggtatattgttttttaacattaaaaccattaactataaatattttattcgcagctcagcttattactaaatcgcctaacccccctaaattattctcattaattatcagtattttctctataattttcctcagtgatattaactaaggcagattttatttttaaaatatcttccgttgtatgcgtcgtatcaaggctaacccgaacagcgccatcaggataagtcccgaattttttatgcgctaacggtgcgcattgcaatccgggacgggtaataatattgtatttgttttctagtatataagagacttctccgggatgataaccttctactgtaaaaagaattgttggtaacccaacttgatgtttacagatcaatttgatcttctttaattgtgatagctcatctataagagttgtacgcaaagtttgtaattgattttgaatattctccactccaattttttttaaacgcctgatagacgctagcaatgaaagtatgccaatagtgttttgtgttcctgattcatacttgtatggtattcccgttggttgcgttgttaatcttgataatacacctgtcccaccctggattaattcattatgagaaaatccattatcaagaataaagtacccgccaatacctgatactccacctaaacttttgtgtccgctaaaaacaaggtaatcaatattacctttcgataaatccattacttgtgaaccaaaagattgtgaaccatcaactaaaaccatcgcgccgtataaatgtgccagttttcctatctcatctatattacaaaatgtaccaatagtattggcgcaactatgaatcactaataacttagttttcttattctttaataaaaacgccaaatgcgacatatcaatttcaccatctgtcacatcgataaattgactacttaccccaatgtcttttaaatggtttatcggcctaaggactgaattatgttctaaatgggtagtaatgacattatcacccggcttaagtgtaccttttagacattcgttgagtgaatatgttgctcctgagttaaaaattactgtcccatgtccatttaattttgtttgttcgataaattcgtgtcggcactcttcaacgagttccgtaacctttttagattgttgcgataaagatcgccctggagttaccccaagagtgtctaaatacatatttatcatgtctttcacttcttgtgactttggccatgaagtagaagctacatccgcatataacattatccaacctccatatggttactaatatatgatttgaattttttagccgtcgcatccatctcctttattccttcattatctctccaatcggatctttcaggcacatttaaactatttgccaatacggttcttatcattcctctctcaatgaaatctgattcacctatcgtaaaaatatacttattaccactatcttcaacgtaaatataggggccagcctcaccgaacatctcaagttcatccaatgagtctattgtatgcattttaaattgatcctttaatttattatgcagatcaatctcggtaggaaaacaacataaatgtgcatggtaacaatacttttgattcgggtccatgatgatacaaccaccggctcgtccattttcataacaaagaggattacttatattgtaatattcacgataaaaatcatttactatattcttaaactgtttcagttcttttattgcttcgtcatcatatatttctgcaaagcaccggcacccccctaaatcagtatcacatttattggtggcaattattatatagccctcaattatctgacctttaggtacgaacgcatagaaatattctccttgtaaaagtattttatctttttcaaaggaagattcggggtgacaaaaaatacatcccattttaaactcctcttatcgtttgtcgattctactgataaatatatcttcatgacacaaattgaagtcttcttcggtatgccaggcaatcatcatgctaaacttatttataatactatgtttattcagtctgctttgtagctcagaataaataggatttggtaagattattctgcattttgccctaatagcaaggcaagaatcaatcacagatataattgtaccgtgagctgtgtttgataaaccgattatttccaccgtggtatcatcaaaacctaatatcgctaattctttcccaaccgttaacagtttaatatcgctgtagcaaggacactgctttgcataagcaatccaattgttatttacttccctgccgaaaaaattgattttattaatattacctatttcattaaaatctctcaggtctacatcgattttagtacatccttctactactatttctataaaatcaaaaacgttcactctgccacatatatatttctcaaaaatttttgaataacattttatttttctttcatctgagtaacaaaccgtcgcatcgacatcattacgatgtgtttgtttggcactttctattatcaaagttggtgattttacactttcatctattccaaaatcgctaagcatattaatggatactcgtctgtttttaagactgaattcacactttcttgttataacaattgacaagcatatatcgtttattttataaaaaaatgcttttatctcactggaaagattatatttcttttctttaaaatttttccaaataaaataatccaagcttcctatgtcacgcttgtaaaaattattaattaggatataattctcttccgttatatcttcatagtttaggtttattccactctccattattttgccccattattttatattggcaacaattgctgctcatttttagtttatattcattcccgagtatatgaatcatgaaatattgtattttatgacctgtatcataatttaaagatccaacaggagaaaaaactgtgattatttatcctgaaaaattaaatttaagtcttcatcaatcatgcaagaatacggataaaaataggtactttaaagagaataatctttcataaattctatgtgatgggactttaaatgaaataattatattgaccagccccctgaattaaatatgatgagctatttctgcataccgaataatatcccttacatagctaaggtgacacaagcctcagagggcagaacgacgagctctgccacttttactgaaacaacgccataatatttaaaggtcattatcagactgttccattttagcaacagttggttgtttgatcccaagcacaactgccagctcagtttgtggaacatcacgggcctcgcggatctgataaagccttatctcccgtttcatttcatcaacttttttagcaattctacggcggctttcagggctgcgtttttcaagcaattcatcaagtgtgatcatactcagttttccaagatgggtagggaattaattcacacgattattttacctcttgcttttacaagaatttcattaataaagtcaaaagggttagtaatgcactaatcccattagcacagagaattacaacgtaatttgtgggttctggataccacaggcttgcgcatagcgcactaatgtttctatactagcttttgttacattattttccattttcgtcaccgttggcggcgtaacccccattctttccgcgacttgcgcgcgagtcagtccagcaaacttacgccactctgcaagtgtttcttgcaatctttctttacgttcttcagcttcgtaagcggctttaaattcagagtctttcatcatttctgccagaatctctgaatgtgtcttatatttcttcatgtttcatttcctccaatctgcgaaatgctaaagctatctcacttgggttgattttttgtgttttctttatataaacttgcagaatatatatttgctttcctgtctgatatacccataatccgcgtgctatatctccccccattgttcgaatttcgtaaagaccatttcccaaatgttttgtgtccggttcacgtagtgagcgaggatctttttctagctttccaatcaaccttacaagttttacccctacttttgctggcaaagacttaatttcttgttcggcctcatcatggtacttaactataaacactctaatttcctcctaatgcaaaaaattaacccaaaaggaaattttcatcaagaggaaaattgcattttaatgaaatgtcacttctgactaaatttcttgaccatagatttccatctatatagcatttgacctatattgaacaataagtaatcatgtgactatcgagacaacaggcacctttgatgcatggttcgatgctttgaatgacaccgacagggccaatatgctagcttcaataatagcacttcgggaaagaggccctatgttacccaggccatacgcagatactgtgaacggttcatgccacagcaacatgaaagaattacgtgtccaaagcaaaggcgacccgctccgagcattctttgcgttcgcccccaagcggagaggaattttgctttgcgctggtaacaaaaagttaaaatgccctctcaaaaggagggcatttattagctagcgtgttctaagaattacttcttatcaccaccaaaaccggcattcaacagttctgccaagttcgcagtagcctcatcgacactcacttgtggtgcctcggcaggctcattcaactggcgacgacgtatgcgatcctgatggtaagcataaccggtaccagcagggatcagacgaccaacgatgacgttttctttcaagccacgcagttcatcacgtttacccgcaaccgcagcctcagtcagtacgcgggtcgtttcctggaacgatgccgcagagatgaaggattcagtcgccagagacgctttggtgatacccaacaggtcacggccataagttgcagccactttaccttcttgttccagcttacggtttgccactttaacgcgggcatattcaacctgttcgccttccaagaactcggagctacctgcactttcaatggtcgctttacgcagcatctgacgaacgataacctcaatgtgtttatcgttaatcttaaccccttgcaggcggtaaacttcctgaacttcgttggtgatgtaacgggtaaccgcatgaacaccacgcaggcgcaagatgtcgtgtggagactctggaccatcagagatcacgtcaccacgttcaaccacttcaccctcgaacacgttgagctgacgccatttagggatcatctcttcgtaagcatcgccaccatctaatggggagataaccaaacggcgtttgcccttggtctctttaccaaaggagacaataccgctgacttcagccaggatagcaggctctttcggacgacgtgcttcgaacaagtcagcaacacgtggcaaaccaccggtaatatctttcgtaccgccggactcctgaggaatacgcgctaaagtatcacccgcagagatgcttacgccatcgtctaactgaacaatcgctttacccggcaggaaatattgagcaggcatatcagtacctggaatcaatacatcgtcacctttggcatcaacgattttcagtgccggacgcagatctttaccactaccggtacgttctgcactatcgagaacaaccaatgaagatagacctgtcaattcgtcagtctggcgggtaatggtctggccatctatcatgtcagcgaaacggatgataccagatacttcactgaccactggcatggtgtgcggatcccagttagcaacggtttcaccgccgttaacggtttcgccatcacctttacccagtactgcaccgtaaggcactttatagctttctttagtacggccaaattcgtcgatcagacacaattcagtgttacgagaagtaatcaccagcttgcctgcggagttcgtcacggacttagcgttaaatagcttcaagctacctttgttacgtacctgaatactggattctgctgctgcacgagatgccgcaccaccgatgtggaacgtacgcatcgtcaactgtgtacccggctcaccgatggactgagccgcaataacaccaaccgcctcacctttattgatgatgtgtccgcgagcaaggtcacgaccatagcagtttgcacaaacaccgaagtcagtttcgcaacttacaacagaacgtactttaatgctgtcaacggagctctcttctaacagatcacaccatttctcgttcagcaatgtattacgcggcaccagaatatcagcagtacctggtttcagaacatcttccgccgtcacacgacccaatacacgctcacgcagtggctctttaacatcaccaccttcaataaccggcgtcatcagaataccgtcgtgcgtaccacagtcatcttctgtcacaaccaagtcttgcgccacgtcaaccagacgacgagtcaggtaaccggagttcgctgttttcagtgcggtatccgccaaacctttacgagcaccgtgagttgagatgaagtactggagtacgttcaaaccttcacggaagttcgccgtaattggggtttcgatgatggagccgtctggcttagccatcaagccacgcatacccgccaactgacggatctgagcggcagaaccacgcgcaccggagtcagccatcataaagatgctgttgaaggaaacttgttgctcttcttcaccatcacgattagtgactgtttcagtcgacaagttttccatcattgccttagcaacacgctcgtttgccgcagcccagatatcgataaccttgttataacgttcaccggctgtaaccagaccagattggaactgttcctgaatttcagcaacttctgcttctgcttcggcaatgatcccggcctttttctctgggataaccatgtcatcgataccaacagatgcacctgaacgtgcagcgtaggcaaagccggtatacatgatctggtcagcgaaaataaccgttggcttcaagcccatcacacggtaacaggtgttcagcatcctagagatggcttttttacccagtggttggttaaccaacgagtaaggcagacctcttggtacaatcatccacagaatggcacgaccaatagtcgtatcaaccaaaccggtgttagttgtgatattgccttcgccatctttcacttcttcagtgatacgcactttaacgcgggcatgcagagaagccagtcctgcgcgatatacgcgttctgcttctttaggcccggtcaataccatgccttcgcctttcgcgttaacacagtcgcgggtcatgtaatacagacccagaacaacgtcctgagatggaacgatgattggctcaccactcgctggagacaggatgttgttggtagacatcatcaatgcacgcgcttctaactgggcttccagtgtcaacggtacgtgaacagccatttggtcaccgtcgaagtcggcgttatatgccgcacacaccagtgggtgcaactgaatcgctttaccttcaatcagaaccggttcgaatgcctgaatacccaaacggtgaagtgtcggcgcacggttcagcagaaccggatgttcacgaatgacttcatccaggatatcccataccaccgcctcttcacgctcaaccatctttttagcggctttaatcgtcgtcgctaaaccacgcagttctagcttgccgtagatgaatggcttaaacagctccagtgccatctttttaggcagaccacactgatgcaaacgcaggtaaggacctacagtgattacagaacgaccagaatagtcaacacgtttacccaacaagttctgacggaaacgaccttgtttacccttgatcatatcagccagggatttcagtggacgtttgttagaaccggtaattgcacgaccgcgacgaccgttatccagcaaagcatcgaccgcttcctgcaacatacgtttttcgttacgaacgatgatatccggcgcagccagatctaacaggcgcttcaaacggttgttacggttaataacacgacgatagagatcgttcagatccgaagtggcaaaacggccgccatccagtggaaccaatggacgtaagtccggtggcagaactggcagaaccgtcagaaccatccattctggtttgttaccagactgaataaaggcttccaacagtttaatacgtttggtcagctttttacgtttcgtttcagagttagtttcgtttaactcttcacgcagcgtttcacactcattttccagatcgagatttttcagcaaagactggatagcttccgcgcccatcttcgcatcgaattcatcaccaaactcttccagtgcatccaagtattgctcttccgtcagaatctgactgcgttccaagctggtcataccgccttcgacaaccacataggattcgaagtacagtacacgctcaatatcacgcagtggcatatccagcaacaaaccgatgcgagatggcaatgatttcaggaaccagatgtgtgcagttggagaagccagctcaatgtgacccatacgctcacgacgaactttagtttgggtaacttctacaccacacttctcacaaattacaccacggtgtttcaagcgcttgtatttaccacacaagcactcataatcctttactggcccgaaaatacgggcacagaaaagaccgtcacgctcaggtttgaacgtacggtagttaattgtttccggctttttcacttcaccaaatgaccacgaacggatcatatctggcgaggccagagcaattttgatcgcatcaaactcttcggtcttagtttgcgctttcagaaacttcaataagtctttcacgaaatggctcctgtcggagttagacctgtcaggagagcagcccatgccgctcccccctatgaccagtgcaaccactggctggtaaactgcccgtcatatccattcagggcagtaccagccggaatacgatttattcgccttccagctcgatgttgatacccagagagcggatctctttcaacaatacgttgaaggattccggcatacctggctccatctggtggttgccatccacgatgtttttatacatcttggtacggccgttaacatcgtcggacttgacggtgagcatttcctgcaaggtgtacgcggcaccatatgcttccaatgcccacacttccatctcaccgaagcgttgaccaccgaactgcgccttaccacccaacggttgctgagtaaccagactgtacgaacccgttgaacgagcgtgcattttgtcatccaccaagtggttcagcttcagcatatacatgtagccaacggtaacctgacgctcaaattgctcaccggtacgaccatcaaacagggtaatttgaccagaagttggcaagtcacccaatttcagcagctcttttatttctttctctttcgcaccatcaaacactggtgtcgcaattggcatgccttttttcaggttttctgccaaacgcataacttcttcatcagagaaagtgctcagatcaactttctgacgggtttcatcacccaggttataagctttctggataaattcacgcagtttggcaacttcctgctgctgtttcagcatcgcattgatcttgtcgccaatacctttcgcagccatgcccagatgcgtttccaagatctgaccaatgttcatacgtgatggtacgcccagtgggttcagtacgatatctaccggagtgccgttttcatcgtaaggcatatcttcgatcgggttgatcttggagataacacccttgttaccgtggcgacctgccatcttatcaccaggctgaatctgacgtttaaccgccagataaactttgacgattttcagcacacccggtgccagatcatcaccctgtgtgatcttacggcgtttagcatccagttttttctcgaactcagctttgagttcgtcatactgttcagccaactgttccaactgattctgtttctcttcatcagccagacccagttctaaccaacgctcacgaggcagtttatccagtttctcagcttcgatgccgcctgcaatcaaaacagaacggatacgtgcaaacaggccagcttcaaagatttgcaactcttctgtcaggtccttcttagcctgacgcagctgcatctcttcaatttccaaggcacgtttatctttttctacaccatcacgggtaaatacctgtacgtcgataaccgtaccggatacgccatttggtacgcgcagagaagagtctttaacatcagacgctttctcaccgaagatagcacgcagcagtttttcttctggcgtcagctgagtttcacctttaggtgtcactttaccaaccagaatgtcaccgccggttacttccgcaccgatgtaaacaataccggattcatccagcttggagagtgcagcctcacctacgttagggatgtcagccgtgatctcttcaggccctaatttggtatcacgagatacgcaagccagttcctggatatgaatggtcgtaaagcgatcttcctggacgacacgctcagaaactaagatggagtcctcgaagttataaccattccacggcatgaacgctacgcgcatgttctggcccagagccagttcacccaagtcagtagatggaccatcagccagtacgtcaccacgttccaccggttcgcccagagagacacatggcatctggttaatacaggtgttctggttagaacgggtatatttagtcaggttataaatatcaatacctgcttcacccggatacatttcgtcttcatttactttgataacgatacgagatgcatcaacgtattgaaccacaccaccgcgtttagcaacagaagttacacctgagtcaacggctactgcacgttccatacctgttccgaccaacggcttatcagcacgcagagtaggaacagcctgacgttgcatgtttgcacccatcaatgcgcggtttgcgtcatcgtgttccaagaatgggatcaaggaagcaccaacggaaaccacctgctgggtggaaacgtccatatattcaacctgctcacggttaaataagctggattcaccataattacggcaagttatcagatcttcaacgaagtggccttcgtcatctaatacggtgtttgcctgtgcgataacgaagttaccttcttcaatcgcagacagatagtgaatttcatcagtaacaacaccatcacgaaccagacgatatggggtttcaaggaaaccatactcgttagtctgcgcataaacagacaatgagttaatcagaccgatgttcggaccttccggggtttcgattggacatacgcgaccatagtgcgttggatgtacgtcacgcacttcgaagcccgcacgctcacgggtcaaaccacctggacccaacgcagagatacggcgtttgtgagtgatttcagaaagtgggttgttttggtccataaactgagacagctggctggaaccaaagaattctttcactgcggctgaaatcggcttagcgttgatcatatcctgaggcatcagtgtatccagatcacccagagacagacgctctttcactgcacgctcaacgcgtacaagaccaacacggaactggttttctgccatctcaccaacagaacggatacgacggttacctaagtggtcgatatcgtcgacttcacctttaccattacggatatcaatgagttttttcatgacatcaatgatgtcatctttactcagaataccagatccttcgacttcttcacggctcaatgagcggttgaatttcatacgaccaaccgcagaaagatcataacgatcttctgagaagaacagattttcaaacagattttctgccgcttcacgggttggtggctcaccaggacgcatcatgcgataaatctcaaccaaagcactcaaacggtcattggttggatcaacacgaagtgtctcggaaatatatgcgccgtgatctaaatcgttggtgaacaatgtttcgatagatttatgaccagattggctcaaacgtgccaacagatctaaagagagctccatgttagcagcacagataatttcacctgtgttgacatcaatgtagtctcttgcaacaactttacccgcaatgtattcaacaggaacctcaatacggttcacttcatctttttctaactggcggatatgacgtgcggtaatacgacggcctttttcaacataaaccttgccgtttgcttcaatatcaaaagaagcagtttcaccacgcaaacgttctggtaccagcgtcatttgcagtctgttgtcacgaatttcgaaaatcgttttactgaagaacaggttcaaaatctcttcagtgctgtaattcattgcacgcagaataatcgttgccggcaatttacgacggcggtcaatgcgcacaaacagattatcttttggatcgaattcgaaatctaaccaagaaccacggtaaggaataatacgtgcgttatacagtaccttaccggatgagtgagttttacccttatcgctgtcaaagaatacaccaggactacgatgcaactgggagacaataacccgctcagtaccattgataacaaaagtaccgttgtcagtcatgagcggaatttcacccatgtagacttcttgctctttgatatctttgaccgtgccttccggtgcttcacgttcatagataaccagacgcagcttaacgcgcagaggtgcagaataagttacaccacgaatctggcactctttaacatcaaacactggctcaccaagacggtagctaacgtattgcagctccgaactgccactgtagctctggattgggaatacagaacggaatgccgcttctaaaccattctggccttctggatcttgctcgataaacttctggaacgagtcaagttggatagaaaggagataaggtacgtccaacacttgcggacgcttaccaaaatccttacgaatacgttttttctcggtataggagtaaaccatagggttcctcagctcgctgatcagtgacccactctgcccgccctaaaggacagctctttacgacactgttttttcgaacagaaaattgaattattttccgtaatactcattgctattactcttaaatcatttcattgcgttacattactaccgagctacccgagtggatcgtagctgagaacgcagtatattaagtcgtcaataggaaaaagtatttgggggttaattaacagccaaacagtggaaatgctgctaatgccctacagcgcaaaaaggctggtgattttttaatcaccagccgtcagcctttcaagtcaggctgctaacttaaagctaaacttacttaatctcaacagaagcgcctgcttcttccagagattttttcagtgcttcagcgtcatctttgctgatgccttctttcagtgtagcgtttggagcgctctcaaccagatcttttgcttctttcagacccagaccagttgcaccacgtactgctttgataacagcaactttgttaccgccaatagcagacagaacaacgtcaaattcagtttgttcttcaacagcttcagcagcaccgccagcagcaacagctaccgccgccgccgcagaaacgccgaatttgtcttccattgcagtgatcagttcaacaacatccatgacggacattgttgcaactgcgtccagaatttgttctttattgatagacataacaagtgttcctaaaattcagaaataatttatacgttaaaaagcaacgaaggaaatcggcaattaagctacttctttctgctcgcgtaactcgcgtaacgcagccagagtacgaaccagtttgcctgcaacggcttctttcatggttgacatcaggcgtgcgattgcttcttcgtaagtcgggagtgttgccaaacggtcaatattggccgcaggaataaactcaccttcaaaggctgctgctttaatctcgaatgctggattcgctttcgcgaactctttgaacagacgagcagctgcgcccgggtgttcattagaaaaagcaatcaaggttggaccaacaaacgcttctttcaggcactcataggcagtaccttcaacagcacgacggatcagcgtgttacgaacaacacgaatgtaaacgccagcttcgcgacctgctttacgcagttcagtcattttatctacagtaacgccacgggaatccgcaacaaccgcagacagcgcgcctttggcaacttcgctgacttcagcaacaatcgcttgtttgtcttgaagatttagtgccattagcttcttgctcctggattaaccgggaagaacccggaactcacatcgctcataacaccataaaggggcctgagctctaaaacacggtgagcagaatccagaaatgaatttcatttggctctgtcaccgtctacgcaggaatattaagtaattacttacacctgcggtcttggacggggcttggattaggccaagctccaaccgaaaattttttatttagctaataaaaaaacttactagccaaacataaggcgccaaattttagacaaatctgacgccaaggtaaagcgataatcacaatcacattcagctaaaattaagctgaagcattcagaccagactggtcaatcgcaacacctgcgcccatggtagtagacaggctaactttcttaatataaatacccttagcagaagatggcttgccttttttcagcgcaaccagcagagcttccaggttttctttcaatttgtcagcgtcgaagtcaactttaccaatggtggtgtgaataatgccgtttttatcgttacggtaacgaacctgacccgctttagcattctgaacagcttcagcaacgttaggagttacagtacccactttagggtttggcatcaaaccacgaggacctaggatttgacctaattggccaacaacgcgcattgcatctggagaagcaataacaacgtcaaagtccatttcaccttttttaaccagttcagccagatcttccatacctaccagttcagcgcccgctgctttagcagcttctgcatttgcgccttgggtaaatacagctacgcgaacggaacggccagtaccatgaggcagtaccgttgcaccgcgcacattctggtcagatttacgagcatcgatgccgaggttaacagcaacgtcaacgctttctacgaatttagcggtagccagctctttcagcagaacaacggcttcgttaatgtcatactgcttagttgcatccactttttcgcggattgtgcgcatgcgcttggtcagtttagccatcgattaaccctccactaccaggcccatggaacgagcagtaccttcaattgaacgcatcattgcgtcaacgctagcaccggtcatatccgcagctttagtttcagcaatttcacgaatctgtgcgctggtcactttaccaactttgtctttgttcggtttgccggaacccgatttaatgcccgccgctttcttcagcagaacagccgctggtggggttttagtaacgaaagtgaaggaacgatcagaataaacagtgatcacaacaggaattggcagacctttttcaatgctatcagttttagcattgaacgccttacagaattccatgatgttaacaccctgctgacccagagcaggacctactggagggcttggattagccataccagctgcaacctgcaacttgacataggcttgtactttcttagccattgataattttcctctatgtgggtgatatcgcctttgatttaaaaggctcccctgtaattttagtcccgccttatccaggccagactactaaaaaacaaaaggcgcgaaattgtatgttaatttctcacctattgcaagccagcaaaagatacgctcaaaaattacgctttctctacctggctgaaatccagctcaaccggtgtcgcacgaccaaagatagaaactgaaactttcaggcggctcttctcgtaatcgacttcttccacaacaccattgaagtctgcgaatggaccatcgctgacacgaaccatttcgcctggttcgaacaatgtttttggccgcggtttatcaccaacctgctgaaggcgattcataatcgcatcaacttctttatcactgattggtgccggacggtcagatgtaccaccgataaaacccatgacgcgtggtacgctgcgaacgagatgccatgttgcatcgttcatgatcatttgtaccagcacatacccagggaagaatttacgttcacttttgcgacgctggccgctacgaatctcaacaacttcctctgttggcaccatcacttcgccaaaagaatcttccatatcatgtaatttgatatgttcacgtaaagattgtgcaacacgaccttcaaacccggaaaatgcctgtataacataccaacgtttttttggggaatctgacatcttagaacctcaggcctgtaataaatgaaactaaacgcaccaggataccgtcaagaccccagaggatcaaagacatcaatgcagtcacggccgcaacaatcaaagtcgtgtgcagcgcttcctggcgagttggccaaatgactttgcgcatttcaatgcgggcttcacgagcgaaagccagtgtggttttaccttttgcagtccagagcgcagccgctcccgcaagagcaacaataacaacaaccgtcatcgcgcgtagaggaaggctatgctctcgataaaggtagtttccaacgatagcaaccgttaataaggctgccactaatagccatttcattacttcaagactacgcctgctttcttgagcatcgctattcgtactcataaaccaacctgtaactatgatttaaatagatagccagcttgcctcgcaagagcaaaacaaatcagaccgaaccaaaaaatttgagtgattgtatctgacttggcgccataattcagtatgacattgtatatctgagagcgatatagccaattcgttgcatcagagcttatctcaccaataattaaaaacaactattgatgagataggttcttattaagacaacgtacaaaaagggcatcggttgatgcccttttagtgtaatcacatcaaaaaattatgcgataactttagcaacaacaccagcacctactgtacggccaccttcacggatagcaaaacgcagaccctggtccattgcgattggggcaatcagggtaactttcatctgaatgttatcacctggcatcaccatttccacgccttctggcagttcaatggtaccggtcacgtcagttgtacggaagtagaactgtggacggtagcctttgaagaatggcgtatgacggccaccttcgtctttgctcagaatataaacttctgattcgaaagtggtgtgtggcttgattgaacccggtttcgccagtacctgaccacgttcgatttcgtcacgcttggtaccacgcagcagaacaccgacgttctcacctgcacggccttcgtccagcagtttgcggaacatttctacgccagtacaagtggttttagtcgtgtctttgatacccacgatttcaacttcttcacccactttaacgataccgcgctctacacgaccggtaactacagtaccacggcctgaaatagagaatacgtcttcgattggcagcaggaatggctggtcaatagcacgctctggctctggaatgtagctatccagggcctctgccagttcgatgattttggcttcccactctgcatcaccttccagcgctttcagagcagaaccacggatgactggcgtgtcgtcgcctgggaaatcgtactgagacagcagctcacgcacttccatctcaaccagttccagcagctcttcgtcgtctaccatgtcacatttgttcaggaacacgatgatgtaaggaacgcctacctgacggcctaacaggatgtgctcacgcgtctgtggcattggaccgtcagtcgcggcaactaccaggattgcgccgtccatctgagccgcaccggtgatcatgtttttcacgtagtcggcgtggcctgggcagtcaacgtgcgcatagtgacggcttggcgtatcatattctacgtgagaagtagagatggtgataccacgcgctttttcttctggcgcgttatcaatctggtcgaatgcgcgagcgttaccaccgaaggttttagccagtacagtagtgatggcagcagtcagggtagttttaccatggtcaacgtggccgatagtaccaacgttaacgtgcggttttttacgttcaaatttttctttagacacgactctattccttaatatcgctccctcgttatattgggagggagctaaatctagatattaaacccgaaaagcttatttagctttacgagcttcgataatagcctgagcgacgttgctcggcgcttcattgtacttcaggaactccatggagtaagaagcacgaccttgggtctgagaacgcaggtcagtagcataaccaaacatttcagataatggtacctgagcacgtacgattttaccggtagtcatatcttccataccatcaatcataccacggcggcggtttaggtcaccgataacgtcacccatgtaatcttctggtgtttcaacttcaactttcatgataggctccagcagagctggtttcgccttcataaagccttctttgaagcccatagaacctgcgattttgaacgccatttcagaagagtccacttcgtggtaagaaccatcgaacagtgccactttaacgtcaacaatcgggtaaccggccagaacaccatttttcatttgttcctgaatacccttatctactgctgggatatattctttaggaacaacaccaccaacgatttcgttggcaaattcatagcctacgccacctggttccattggctcaatacgcagccatacgtgaccaaactgaccacgaccaccagactgacgaacaaatttaccttcttgttcaacagtagaacggatggtttcacggtaagcaacctgaggcttaccgacgttcgcttcaactttgaactcacgacgcatacggtcaaccagaacatccaagtgaagctcacccataccggcaataatagtctgaccagactcttcatcggtagacacgcggaatgatgggtcttcttgagccagacgacctaaagcgatacccattttttcctggtcagctttagtttttggctcgatagcaacagagatgactggctctgggaattccatacgctccaggataattggtgcgttgatatcacacagcgtatcaccggtagtcacatctttcaggccaatcgcagcagcgatgtcacctgcacgaacttctttaatttcttcacgtttattagcatgcatctgaacgatacggccaaaacgctcttttctgtctttcactgggttaagaacggtatcaccggagttaaccacaccagagtagacacggaagaaggtcaagttaccaacgaacgggtcagtagcgattttaaacgccagtgccgaaaatggttcgttgtcgtcagaatgacgctctgctgacgtatctttaccgtctggcagaatacctttaatggattcaacatccgttggtgctggcaggtactcaataactgcatccagcattgcctgaacacctttgttcttaaatgcagaaccacaggtaaccaggatgatttcgttagtcagaacacgatgacgcagaccagctttgatctcttcttcagtcagttcttcaccgccaaggtatttttccatcagttcttctgatgcttccgcagcggcttcaatcaaattgctacgccattcttccgccagatcctgcatatcagctgggatatcttcgtaagtgaaggtggttccctgatcttcatcgttccagttgatggctttcattttcaccaagtcaacaacaccggtgaacgcatcttctgcaccaatggctaattgcagaggtactgggtttgccgccaagcgagttttgagctgctcaacaacgcgtaagaaattcgctcccatacggtccattttgttaacgaacgcgatacgtggaactctatatttatttgcttgacgccatacggtttcggactgtggctgaacaccaccaaccgcacaataaaccattacggcaccatcaagaacacgcatggaacgttctacttcgatggtgaagtcaacgtgccctggggtgtcgatgatgttgatacgatgcgcatcaaactgcttagccatacctgaccagaaagcagttgttgctgcggaggtgatggtaataccacgctcctgctcctgttccatccagtccatagtagcagcgccatcatgaacttcaccgatcttatggtttacaccagtgtagaacagaatacgttcggtagtggtggttttaccggcgtcgatgtgtgcactgataccgatgttacggtagcgtgcaatgggtgttgtacgagccatttgattcctctattcctaggacgttcaatgtaaatctgggtggcagaacagccacccagggcatcatcactacgatgggattaccaacggtagtgtgcgaacgccttgttagcttctgccatacggtgaacgtcttcacgtttcttaacagcagtgcctttattttcggctgcatcagataattcgttcgccaggcgcagggccatagatttatcaccgcgtttacgagcagcttcaacgatccaacgcattgctaacgcattgcgacgaaccggacgaacttcaactggtacctgataagtagaaccaccaacacggcgggacttaacttccacggttggacgcacattatctaatgcaagttcaaatgcttccaggtgctctttaccagaacgctgagccagggtctcaagcgcactatatacaattgcttccgcagtagattttttaccatctaccatcaggatattgacgaatttggccagtaattcagatccaaactttggatctggcaaaattttacgctgaccaattacacgacgacgtggcatggaaatactccgtttcgaattcagggttgtccaaaactctacgagtttattttgacattaaggtaaataatgtttggccttacttaacggagtaccattaagcttttggcttcttcacaccgtacttagaacgaccttgtttacggtctttaacaccggaacagtccagtgcaccgcgaacagtgtggtaacgcacacctggcaagtctttaacacgaccgccacggatcagaattacggagtgttcttgcaagttgtggccttcaccaccgatgtaagaagaaacttcgtaaccgttagtcaaacgcacacgacatactttacgcagtgcagagtttggttttttaggggtggtggtatatacgcgagtacatacgccacgcttctgcgggcaagcttccagagcaggaacgttgctttttgcaaccttcatgctacggggtttgcgcaccagctggttaatagttgccattattaaaaaaactcctggtttttttgcttcgtaaacacggattaaatctcttgtctgccctaacggcaaaacacgaggacgcggaattttatggctgactcgccaaggtgtcaagaaatatacagctttttctcaactaccaagcgaattgttgatggtgttttaccgtcaggttaacaaagtcagtatagtcgatcacttgcactttgtctgaaacctgatcgtccaatccccgcgcctcaatatcttctttcagtgcatacaaggcagcaccacaactgatcaacgccgacagatagcaattaccctcaatacctgccagcacaccatcctgaataaacaagatgtcatcaccacgggcaagcagcttggatatcacattgaaatcacattgataaggcgatcggccaacagtatatagcatctcattgtccttccaatagctcagaatgtcagcacaacatcatagtcaaccagtttctcacggatcgtttctgcgggtatcactttcgcatccagaacaaaatgattgactgagcttaatccacgcataacaagatcttcctggcacaaataacattcttcaatatcgtacaaaggcaacaccttaaaagtagcgatatagtttctggcgagaattctgtcaggctgctgattgggtagtagttgaagtacaccgtcagaaataaaaaatacccctaccttttctgttaatgccgaagtggccagcaatgcatctaaaccttctcgaccccctgcatcaccatggggtgttttagtaaagataaaagcaatttttttcatttttgcctcttagaattgcaccacacggtcgcaaatcaacatagcttcagctagtgtgcccaatccacttaattcaaacccttccgcgaggtttgctaccggtaaattcaactcactcgcctgctgagcatcaataacaccacggcgaagggcagcggcaatacaaatgtgcatgctaaaccgatgctctgttgccatcatctgccatgcgctaaccaaatcaaactcatcactggctggtgaggtcaattgattgccgttataaaccccttcccgataaaaaaatacggtattaagtttatgccccatcgtaatcaaggcttgcgcgaattggtaagcactgctggcttgttgggtaccatatgcgggccccgtaaccagcagacaataagacagcgaagacattaccgctcaggccctaaacattcaccatttttaaactggcgaatatagaggtaaacagtatgcttagaaatatttaaacgctcagcaacctgattgattgcatctttaatatcaaaaatgcctttctcatagagatttagaaccacctgtctgttcttggcattattggatacactgcgatcaatattgacttcttcgatagtatattcaagcgtttgcgcaaccaaatcatccacagatgaggcaaaatttacatttggagcgacatcatgtgtttcctctggaataaatgtctgaataatttcagagaaagggacatcgagattcatattaatgcacaagaggccgatcactcggcggttccggttgcggatcgcaattgtgactgacttcatcaatgaaccgcttttcgctcgggtaaaataggctttggatgcactacagtcttcgtctgtaatgtcatgtaacatacgcaatgcaagatcagtgataggtgaacctatcttacgacctgtatgttctccgttggctattctgacagctgaacatttaagatcttccaatgaatgaaggacaatctcgcaatgcccaccaattagcatagccaagccatcaactgcggcttcataagactttaaaatttcgtgatccgtttcagtaaacggttggttttccagtaaatcgacatcactgatatcaccagataataacgggttagacattaaatacaccatccttcaatcgcagacaacgtcttgctaaaaacacaacgtgataaacctataaaaatttcttgtgaaaattcaattattgcagattaacagagatctcaatcaaagatctttgcatccacatgaaatattgacgttaaaaccacatgacattatcgtcaagccattgctactcagacatttgggctctatcacagctttcagtaacaaaaaaccgttgacagaatctctaccaacggttttatccgtattgatcaaagatatttagcgaacagctaaatagcttacttagctttggtctccgctttaacatccagcagctcaatatcaaatactagtgtcgaatttgcaggaatacccggcagatccgctttaccataggccagctctggtggaataaccagtttaatttttccgccttttttcacattctgtaaaccttctgtccaacctgggataacgctatccaggcgaatagaaaggggttcattacgcttataggaactatcgaactctttaccgtcaatcaatgtcccccggtagttcacaactaccgtgtcgcttgccacaggcttcttaccactgccttccttctctattttatacaaaaggccggttttactcttaacgacacccttttccttagcaaattcttcacgatatttaacgcctttagcttcattctcgctggcttctttttccatcttagcttcagcagcagacttcactttaccttcaaacgcacgcagcgtattttcaatttcgctgtcagtcagtttgctcttattattgaaagcatcctgcacacccgataacaattgatctttatccaatgggatacccagagatttctgttctttcagggtgttttgcatataacgccctaaagatgcgcccagagcataagcattttgctgatcttctgttttaaatgcgctgttcaattctgtactactctggctatctgctttagccgccaacacctgaggggcgctgaaagccatcgctaatgtggtagcaagcagggtaactttaaacaatgatttcatctgtttctccaatagctttgggggattttaccgtcagcaaaagttatgcaatcaagtcactataaccgtctacaggagcacaacacaatatttgccgttttttagtgccccaaacttattaggacaacataaatgactagaggtttcataacaaccgcatttcacagaatattctgggcatagtaggctactcttaattaatatgaggcatctaacacaggcaatacaggacctgaaacgggagaaaatcatggatctgtcaaaatttgagcaacggcttgagtgtttggaaagtcgaatggcctttcaagaaagaactatcgaagaattaaatcaggtagtgactgaacagcaaatggagatcactaaattaagagagcatttgcggttgatgacagaacgattgaaagccactcaaccctcaatgatcgcttcacaatctgaggaaacacctccgcctcattactagaaaagacattaaattacaataaattagggcaagcgctgaaactaactattccaaacttgccccgctttttttaaatattaaaagcccactatccgcttcagcttatcagtggcaaccaccgccaccgcagcatccgtgtccttcattatggtgatgatgactgtcgtcatcgccgtgaccaccacagcacccctcaccatgttcgtgaccatgagcaccatgaacatggccatgagccagctcttcttcggtcgcttcacgaatggcaatgacttcaacattgaatttcagattctgacccgccagcatatggttaccatcaaccacaacatgctcaccttcaactgctgtaatttctacgggtactggccccatatcggtatcagccaggaaacgcatgccaacttccagttcatcaacaccaacaaagacatcttttggcacacgctgaaccagattgtcatcatactgaccataggcatcatcagcctgtacgctgacatcaaaactctcacccgcctcacggccttctagcgccttttccaaaccgctgatcagtgaaccacggccatgcagatagtccaacggcgcactcgccggtgactcatcaactaaaacaccatcttccgttcttacttgataagccaggctgactaccaagtcttttgctactttcatgacatctcctacccgtgggtctaaaaatttttaccaattgtagcggaattttcagtctctgtactcactcgcgctaatattcacataattactgtggggtaaaaataccaataacctgctcctgctttctgacatgagagctcactttctcatcagtctggcgttgttggtgaccacaatggacacattccaccacatccacctgatcttcttgccacattgccagcgtgtcctgagagtgacattctggacagacagcaccggcaataaatctcttacggcttactgacatgatttgctccgctattattcatgtattcatactcattccaaccatccggttgacgacgttcactcagcatttctcgttcgaatagctcttccagttcccgtcgtgcctcttttatacgagatatgtgagccacatcaatacagcagcaggactttaggcggctgtaacatcgttccctcctcaagaacgtgtcagaacacgtattttccgttaccatgcatacgaacgttataaaataaaacgcttactatctgttattgctaatttaacatattctatacaaacgatacttatgattgttttctcttcattacaaattcgtcgcggaactcgtgttctgctggacaatgccagcgccactatcaatcccgggcagaaagttggtctggtagggaaaaatggctgtggtaaatctaccctacttgcactattaaaaaatgagcttcaggctgaaacaggcacattcacttttcccagtaactgggcactttcttgggtgaatcaggaaacgccagcactggaaatacccgctctggaatatgtcattgatggtgatcgtgaattccgtcaactggaacaacaactgcggatagccaatgaaaaaaatgaaggtaatctgattgctcatctgcatggtcaattagacacgattcaagcctggacgatccgttcaagagcatcaagtctactgcacggtttaggtttctctcaagagcaacttgatcaacctgtacgtgcattttccggcggatggcgcatgcgcctcaatctggctcaggcactactctgccgttctgatttactgttgcttgatgaaccgactaaccatcttgatctggatgcggttatctggttggaaaaatggctgaaaagctaccccggaacattaatccttatctcccatgatcgggattttcttgacccgattgccgataagatcctccatatagaacaacaatccctatttgagtacagtggcaactactcatctttcgaacgccagcgcgccaccaaactggcgcaacaacaggccctttataaaagtcagcaagagaaagttgcccatctgcaaagttatattgaccgtttccgtgccaaggccagcaaagccaaacaagctcagagccgtatcaagatgttagagcggatggaattaatcgctcctgcccatgttgataacccatttcatttcagtttccgtaaaccggaaagtctgccaaacccactcctgaaaatggaaaaagtcagcgcaggctatggcgaacggaccgttttaaattccatcaaactgaatctggttcccggctcccgcattggcctgcttggccgtaatggtgcgggtaaatccacgttaattaaactactggctggcgaactgcaatctcagagtggaacggtagaattagctaaagggattaaactgggatatttcgcccagcatcaactggaatatttacgtgctgatgaatcaccattacagcatttagtccgcattgcgcaacaggaaacagaacaacaacttagagattatctgggcggctttggtttcaaaggtgatcaagtgactgacccaagtgggcgtttttccgggggagaaaaagcacgtttggttttggcattgatggtctggcaacgccctaacctcctgttactcgatgaaccaacgaaccacctcgacctggatatgcgtcaggcactgacagaagctttgatcgactttgacggtgcattggttgtggtttctcacgaccgacatctattacgttcaacaaccgatgagttgtatctggttcatgatggccgggtagaatcattcaacggcgatttagaagattatcaacaatggctgatagatcaacaacgtcaacaaaatcagcaaatacgtgaaaacaacgataaggaaaaagagacatccagccaaagtgctcaggaaagaaaagatcaaaaacggcgtcaagctgacttccgtaaccaaacgcaacccttgcgtaagcaactggctaattttgaaaaacagatggagaaactgggtggcgaattggttgcactcgaaaatcaacttttagacagcgctatctatgatagcagccgtaaagtcgaattaactgaatatctgcaaaaacaaaatcagaccaaattaaaattggaagaaattgaattagcatggatggaaattcaagaacagcttgaaaaaataacacaagagtttgaaggataaatgattttacaaattatcattcaataaaaaataaagcggaaaaaacaatccgctttatttttcgataagtgaatctgtcattgagtcaaaaattcaagataatttcaattaatccttggatatcagttaaaattcacattgttatttaataacgtcatgtattaccccctaataaatcaaaaaatcagcattcaatgatattcataattatcattgaataatgaaaaatcctcattagctcaacattaatgaggatttcttatcatcagatgacattttttgtaataagagaaaaaatttctcatatcacaacatattttataaaaagagggtattaactgaatccttttgaaggaatttcccatatattggagaaccgttttacattgcttgctgtgtaaataacagtgtgggatatattgcggtgaccgagataatcctgaataagacgtgtatctcttcccaaatcagcaagagcatagccgcaggcatgtcttaacatatgtggatgaggtgaaatatcgactaatgcttgcctgccataacgttttaacaaactataaacctgatagcgtgaaatcgcacctgatttttgtgataaaaaaacccacgatgtgtctgattctctccagctcttacggatattaatccattgatttaacgcattaagttcttcaggcaccaatggatgtgttgttgatagtcctccttttaatcgccttacgtgaataatttccgagctaagatcaagatcggatagtgtcagattacatagctcactaactctaaatccatgaataaaacacatgagtagcatgcaataatcccgctcagcatgacgcccctgacgtgctttttctaaaatcgcatcaatttcatgtctggttaagaacttacgtttcttcatgaaaataattcctgtgagatttgggcagatagttaccgatagagaatattaatctaaataactatatcaattaatagagattttatggaattactgatctaaaattccatttatttatcataagaaagaaacaaatattttttatatgtaaatataaaattatatatatcattgaacagtgattttttgatagaaaatatcaggatgtagaatttttattaaaaattaagaaactattttacaacaaaaaactaaacagaatgcaccaaactgtgaatagttttacacaaaactatcacctaagtcaactattgtacctctccagactgacaacatttaaccatttgtaatatatggtttttttaatatctttttatgacttttaatattttatcaatattattttataaaaaattagttggtttgtttgagcttgatcagagatcaatcaattggaaagtttataaatttaaattaatgtcgatttttggatattaattccaaaatattatacattttagtatttataactaaacaaaacagtttggtgcattttgtttggttttaaaaaatgttgatatgagattttaagaccctttttgcattggatatctggtgtaggagttgaaatcctacactgctacttttgtatggttatgggtatcttatccttaagttaaggaattaactcacatgaaattgaataaattggttatggttctcggattgggtgcaaccctagcagcaggttctgtcaatgcggcccccgagccttcccccaaaactaaaagtactaaccaaggccacggaaaagtgacttttgaaggttctattatcgatgcgccttgttcaatccaccccggtgatgacgatcagactgtgaaactggggcagatttccaacaaagcactggcaggaggcggtaagtccaccccggttccttttaatatccgtttactagactgtgatgctaacggcttggaaaagaggactgtaacggcgactttctctgggacaccctctgctgtgaataaggacctactggcaattgttggttcggcctctggtgcggctattggtatcaccaacgataacgccaagctgatcaaactaggacaaccgagctcacccacaatcatcaccgatgattccgactctaccatgcgcttcgctgctttcttacaaggtgacggggcttctacgactatcgttcctggtgatttcaccgctgtggctaacttcactctgacttaccaataaaggtgttgaaagaagcctttctgtgcgttggaaagtctatctgtttctctttcccgcggttgcctagccttcaggctgacaggggaaacagcgggaaagaggggtccctacaagattagggaaatgaatttgccggtaaaccaaattttggagagcgagatgactcttcttagccgtccaacctgttctaagatgttaccttccctgctgacgttgttagtgctaaccagtctgatattgtcatttatggcaaccgctatcaaccaagagcacggccgcgtcaacatgcaaggctccatcattgatacaccctgtacaattgctttgggcaatcaagatcagaccatcgacatatcatctattttggtcggacaaattatccgcagtggtcacgggccggtacggcttttaagtatacagttgattaattgcctgttggctcccgtattactgaatcgcctgagcaggtcatactttcaagtgacttttgatggtgcggctgctcgtaacgacctatttagcataaatggcgaggcgagtggtgtgggattacagatatcggacagtacaggagcggtagtcgcgccgggcaaacccatgcctgtagaggatctgcaaataggctcaatgcggctggattatactttacgtctggtaacagctcaccaagtgttacgcgccgaggtcctccacaccatgatacgtttcaaactggattatttctgatgaaaggacccatcatgccatcgttactttgtggagcgagggatagctcggtggcactgtgtatcttgttggctctttgtcgcgtgcaggtggtcaaggctgccgatagggtggaattcaacacggatgttcttgatgtcaaggatcgggcgcgtattgacttaagtcagttttcccatgctggctacattatgcaaggtagctaccagatggtattacgcttgaataaaaacgaattgcccgagcagacagtgcagttcattgctcctgatcatgatccaaaaggcagtgaagcgtgcctgacgccgaagatggttgatcaactggggcttaaagcggatgcaatccgtcagcttacttggtggtataacggccaatgcctagaaatagcttctctgaaaggtatggaagttcgaggtgacttgggcgctggggcactatacatcagcatgccgcaggcttacttagaatataccgtagaaaactgggatccgccgtcacgttgggataatgggatctccggtatgttgtttgactacagcgtcaatgcacaggtgacaaatcagtcaggcgcaggcagccaagcgcaatctttaagtggtaacggaacagctggggccaacttgggaccttggcgtctgcgggctgattggcaagtgcagtacagccatactacgggacaggtaggaagtgcccagcaaagctgggagtggagccgctattacgcctaccgtgtgatagccgctctgcgtgccaagctgacgttggcggaagactacctcaactctgggatgtttgacagtttccgttacatcggagccagtctgatatcggacgacaacatgctgccaccgaacctgcgcggttatgcgccggaagtgacaggggtggcgaagactaacgccaaggtgaccatcagtcagcaagggcgtgtgatttatgaaactcaggtggcagcaggccctttcagtattcaggatctgaatactgcggtgaatggcaagctggatgtgaaggtacaggagcaggatggcagcgtacagacctttcaggtgaataccgctaatgtcccctatctgacacgtccgggtatggttcgttacaaaattgccgccggtaagccatcagatattaagcatcgcagtaaagggccgggctttgcaaccggagaattctcttggggggtgaacaacggttggtcgctgtacggaggcgctttgctggctaggggctataacgctctggctatcggtatcggccgtgacttgctggcgtttggtgcattgtcatttgatataacgcagtcgcgagctcagcttctgcatgatgacaccaaacatggaggttcgtatcgggttagctattctaaacgctttgacgaatacgacagccagataacatttgcaggttaccgtttctcagaacgtaacttcatgagcatgtcacagtatttagaggcgcgttattacggtgtcaataatggcagaggtaaagagttctataccatcacgtttaacaagcagtttaaggaattggggcttagtgtttatctgaactacggccatcagacctattgggaccgtccgaacaacgatacttataacctgtcactatcacgttatttcgacattggacgctttaaaaacatcagcctgagcctaacggcatatcggactcagtacaacggcactaatgatgacggtttgtatctgagtatggctgtaccgtggggtgaaaatagcacaataacctatgacggtcagcttagccgtaatagtagtaatactgtgggctactatgaccgtatcgatgacaacaatgcatatcggattaatgtcggtaacggtcagggtgggcgtagtattggcagtggttacttcacccatgagggggatatagctaagttgacagcgaatgccaatttccgtggaagtgaatatagcgctatggggctgtcacttcaggggggaatgacggcaacggcagatggcgctgcgctacaccgtatcaacatgatagggggaacacgcatgatgatcgacgctgatgggattggtggtgtaccaatacgcggttatggcagtgtgacccataccaacatttttggtaaagcggtggtgagtgatatcaacagttactaccgcagcagcgttaatgtggacgtgaaccaactggcggataacgtggatgcaactcgctcggtggtacaaggcacgctaacggaaggcgctattggttatcgcaagtttgggatgatcgccggcgagaaggcgatggccattattaaattgacagacggtacggctcctccattcggcgctatcgtgatgaacgaacgtgaaatgcaaactggcatcgtgaatgatgaaggaagtgtgtggttaaccggcattaatccaggcgagaacatgagtgtgcattgggatggtcgcatacagtgtctcatcacattaccgcaatctcttctagccaacttgatgaataatctgttgttaccttgtcggcgtgttaaagggaatgatggtagtgacgctgtagagacagttgttacaccagccaacacaggtaacgtagcgaggatcggcggcgaaaatggcaggtgagttaagacaaactggatgggtaattcaggtgtggagaaccgtaagccgcgtaagtatgtgctgcgagattagatttataccctatggatttcaagatgcatcgcgacggcaagggagcgaatccctgggagcatagataactatgtgaccggggtgagtgagtgcagccaacaaagaggcaacttgaaagatgacgggtatagccgtgatatcaaccatatttgcgcattcgcactcgattccagccaagggtggtggttctttccagaagattaataaaagtatggggtggatgaatggaaatgttgcctaaagataagtacaaccgcatgagtatgacaatgaaaaaaaacgcggcggcttctgctgtcatgttggccggtattctggctgttcagcaagctaatgcagctattgccctcgatcgcacccgcgcggtgtttaatggggaagatagatcaatgagccttagtatcagtaaccagaataaagagttgccctatcttgcgcaggcttggattgaggacgagcatggcaacaagattaacactccactgactgcactaccgccacttcaaagagtagagccgggagccaaaagccaagtgaagttgcaagtcactcagggcatcaacatgttgtctcaggataaagagacgctgttctatttcaacctccgggaaattccgccaaagtccaacaaacccaacacattgcagattgcgctgcaaacacgtatcaaactgttttatcggccaaaggctattactgttggccgcacggactacgaaaatccttatcaggagaagttgacgatgactcgacaaggggatcgctatgtagtgaacaatccgacgccatactacgtgaccatcgcatcagcatcgtccagcctaaatggaacagcggtatccggttttaatccgatgatgatcccaccaaaaggcagtgctgtgttgggtggcagtgcgtcagcaatgggtaacaatcctgtactgattttcatcaatgatttcggtggtcggccaaaattagtgtttggttgtagtggtggcacttgtaccgtgaaaagtagtaaacccggttgagatgtttgctgaaattggggtagctcagtaaaggaggcatgtatgaacaccatcctaaagccagatcgagatggactgataccgtccttgtgtcggcgtaaccgattacatgttcttaaagcgttgttgctcttgctttcgataagctcagtgtgtaatgcgaaggataaatttgaatccattgttcgtataaaagttaatgtgcttagagaagcttgtaatatccagcctggagatgatgcaattaccgtggacttcgatacagtgttcggaaaacacctttatcaaaatgaacgtagtcatagtaaagcgttttcaattcacctcataaactgtgatgtgacaagagctcgggaggtgaatataaaatttctaggtaaggaaaataatgagcttcctgggcttttggcttttcaaccgggaagtcaagcatcaggggcagcggttggaatagagtctctggctggagaacctatttcgataaacaagactgttaaaaaatatagtttaaataatggcaatgccacgctggactttaaagcctacgtgcaaggggaaccttctgctatcagaaatcactcaatagtatttggtaagttctcggctatttcgacgtttatgttggactatgagtgaaatggagggaatatgaggggctttttctatcttgtttttttcatggcattggcaggtgttccatttatagaggcaaatgcgggagcctttgttatgcctattggaatgagcgaagataatgacaggacgccgcgtacaactcaagaaataatcgcctgggatgaaaatgatacagacccaaatccatgtcacggttctggtgtttgttatgttggcccagatgtgaagtatagatatcgcctgccggggatgcatggtagttgtattgaggggaagcattgtattgaaatctctcgcttgaagactaagaaagaggtagctgaggcttacaaaaaaacatttccgttgccatatcgatcagatttccgtttgatatccactgatgcgacgtgtataggattgttttttattagacaccaacctactttaggattttcagatgcggagctgtggccgggtagtacttgtggtcggttgccaccaactaatcaatcttgcaatatttttttgccacctgttattgatcatggtgatttgggggtggaaaatctcaacgggaataagaaaacgataacaggaaatgtgcagtgcacattgccagctaacctgactttatatacaaaatcctcaacgggtgaaaagtttatttatttaaatcctaaaaaaacactttactccgatgtggatatcaatggctcaaatgcttggaatggtgttccaataacggtaagtggaaataatctctattcattttccttttcatccagacttcaatcattgggtaaagttgatgcaggtgcctattcgggagatgttattgtgattatgacttttaattagttttgatgctaatgatgctggggagtaataaggtgaataacttgtttgttcttaaacatatatgtgtgatgttgcaggtttggaaaataacaaggcgctgcattgtaccttatggttgttatttctacctactattagcagccgcatttcttttaacaggatgtgctcaagagctcacaccaaagagagtgccgacatcaagtaaaataaaagcatcgtcaaccactaagacattggttcattcttcattaccccctgaatctggaggcggtgattgtcgttttaccggaaatgtgcagccctctgctgacaacaattccggtaaattggcacaatgtactcgcgagttggaggcattgaagcagttcagcggcactaaatacacacgctacaaagccgaatttgatcgcattgcccgtacgggtagtcaatatttggcggtggctaacgggatcagtgaggatatcaatgatttagtacgtcctaagtatcagtatgctcttaccagtttgtgttatcgtataaaaaacgacttatcattggcattaattaatcaggtagatgcacaatgagctgtatacgaatgcatcttcatcgctgtgcctggttattaattggttttttgggaacggttgatattgtaagtgcagcagaaagtggaaactatacacctcctggcggtacgccctcggtggatagcttgatggaaagcgccagtaattctgattatggtctgagtaccctaatggcgcaacagtccaaatctggtgagtcatcttcaaacagaagtgcatcaaagcatgcggttggaacatccattcttgttggtatgggggcctcgtccggtggtagcgaagcagcagcccgtaaagtattgcgtgcagagaatcgtaagcttaagagacaactgaccgatagtatcgccgagttgaagtcttcccagactgaactagagaagagccgtaagcagctatctgaccaccaatcagtcaggatagaaatgcagaagcaaaaggatacattacaaaaacagttaagtgaccatcagaccctactgacagctacgcagcatcagttcaaagaagcacaaacgcagttagaggccgtgcgtaaacagttcagagaagctgacattgttcgagagcagttagagacggcattggtttctactcgttatcaactagtgcaagccaatgatcgagcggtaaaagccagtaaatccgtgagtgtaccgctcgatagcgataaccgtaagcgtgactatgtcgtgggccaagcgatggcctcggggctaaaagagacactggcgagttatgcagaaagtgggttatctctggatcctgttcgagtgactgccggattaactgatggattacgcaatcgcatgcagcttaaacgcagtgatatggataaatattacctgacctttgcggagcaattacaaaaacaggtaaatgccaaggttaagatgggagaagcactgattgcgaagaaaactgccggacgcaagccagcaaagaaagtcaatggcttggtgtactttgtggtcaagaaaggtcaccctattaaggatcaggatgcaccggtttcactagctttgtctgagcagattgttgatggtgccactttaagcgctattccgacactgacacttaccgctgacgatgatatacccgccgtagtgcgtgaggcgcttccattgttgggtgaagaggccgaagttgatgcctatgctttagctaaggtcgtgtatggcaacttaccgatgccgaaaggggtaaccccgtttacggtcttggtctatcacctgaaagggattaaaccccagtaaaaataaaccattttgacatccttatgccttggatttacccagggcatcatcaatctcatattcacctgatttaccctcataataatgatagatttatcaggcacaacaaaatcattattatttaaccagaggttagataattaataaaaacattcccctcttctacattacaatatacccgttatctttcaatctgcctcttttacacattatcaatcagtgaagagaataactccgtttcatttatcaattcataattgataattggactccataagataccaaaatcaatctccatatcggtttttaacacttctaataaatccaaatattgtgatggaattgagcgaataactttttccggaattaatgaaaaaccattacgtttaattattagttcaatcattaccataatatcattcgtttttaacattaaattcatactattatcataaatagaaaatgcgttaataccatcaataaaatcaattgggatatcattctcatccatgtcaataagctgatacaacgatgccatttcagcacttaattctgtaaaatgccgaaaccaatcactcccttttttaaaaaggtaaacgagtttttcagtaaaaatctttctaggcataagtgatgaagtcaatggtagaggaacaatggcgatatgtaataaaccagagtttaatagattcatttgctgctcaaatgtcagaccagtaattagcaccagcacagctttttccttcctacctagaaaaatccgctcttccatttttccagaatcataaataggaaaacaagagctaacataaaggtaatgtggcgcatcatcttgcaaatcatgattaacctgaatctgaaattgctcaaaatgacccagtaatttctgagcattctcaaaggttttttgtccaaaatcagtcaatctggtaccacctggtcctctggaaaacaaaagagccccaaattccgcttccagtgcattaactttcttagtcagtgcaggttgagaaatatgtagtatttgagaagccttatgataattaagtgtttcagctaacacgataaaagctttgagattgcgtatatccatatctccaccattcaggtttatctttcatactttcttacgttattatttcaataatgaactaaattatttagacttaactgaaattaattaaatagagattaaacaacaattataagatgatcaattaatttattataaaaatgttatcaatataaatatagattttattaataccataattccttcttaccctctaagataaatgggtaagtaattcacttaaattaaattcgttagaagataagaaatttcccgatttttagctgttttccctatagtaattcctatacacctaatgacatgtatttcctactatataggatagcgaaatatagcaggtaagcatcattctgaaaatataactattaattctcacttttaaataaaacctctcctccatccaccaataagactaatatcaatcacatagcttcatatcttttacataggtattcggcgacgtcaaagatatcttttggcatattaaataattctcacttctcagtttataattcacatacaaagatgtaggaaaacttaaaaaaagtgaaataatggctatcgaaccaaagtattttatgaaactatcatggtactttgggcaacggtttgttatattagaaagaataatagaaaccatacaataccaaatcaaaggagaaaaaaataacataataataacactacttgagaatgttattttctcatccatattaactaaagaaaccagattttctcctgtcaaaaagaaccctagtgatactaaaacaaaagtagcagcagcaacggtgatatgtataatcttttttttattttccataattcccccagttcttaaggaattaattgaagtcaaaaacaacaatatcaatcacatagtttaatatctttcacataagtattcggcgacgaccaggatattcttggacataccaaatagtcatcactttttaacttataatgcacatacaaagatgtagggaagcctaaaaaaaatgaaataatagctatcgtcccaaaacagttaacaaaaccatcatgatgttttggaggacgaccagttatactgacaaaaataactgcaaccatataatataaaatcaaaggagcagaaaaaaatattataacaacaccacctgagaatgttatttgttcatccatttcaattaaagaaattatattttcccctgtcaagaagaaagtagataaagctaaaagaaaaatagcaatggcaacgatgatatgtatagttttttttctcataatacccctagttataaaaaaatcaaatacaaccatatcaatcacatagcttcatatctttcacataagtattcggcgacgaccaggatattcttggacatactaaatagccatcactttttaacttataatgcacatagaaagatatggggaaacttaaaacaattgaaacaagagctatcaaacaaagatatttgttaaagctatcatgatgttttggataacgaccaaccacattaacaaaaacaataaaaactatataatataaaaccaaaggaaaagaaaaaaatgtcataaaaacactgcttgaaaatgttattttatcctccattaaaaccaacgaaatcaaatattcacttactataaacatagaaaacgacattaaagctaatattaaaattgcgcaaataatacgtattattttattatttaacatatctcccccaattataaaaaatttgattgagaccagtttctggagttcttggttttctctccatttcttttttaattaaattaataacagcttcactaattttatatttcttatctatagaatcaagtgcaacagtaacaccgacacctacaaaaaacacaataatagcaacaccaactacactggcaccagcaatagatgtaactaacatcaaagacccaatagtccaagaaacaaaggctgttattactgtcttagccagatctaccgcaatattacctagaaaatcagccagagtgtattcatccttaaacataagttcaaccgttcgataagccgcagaaaagaatatactaaacttcattcctttaactatgccgctatttaatcctttctgcccaatccccatagatatcaccttcatattagaagctttgtatcttgaagcagtgatgatctttctaactcccgcataacctgatattttaatatatctgtttccatccttacccacatactctgttgctttaatccctaatcttttaaattcccctataacattaaagagatcaaaagaatcatgaatgttacctgcatagggtgatatgggatcggtaatctcaaatattttctttataaatggacttttgggttttggcgagtcaatatcttctagcacatctttcgcttcatctaacgatagcagcgcaatataggttgtattctctcttaactgcttttcgagaccaatggcatcaaagaattcatgctgaggttttaattggttagccccaacatgacctctcaggaaatcccccatatagccctccagcgaggggttgtattttttatatgtcatcgtgaaaccctttccacatttcttaaaaccaataattatcacattagtgtctaaccgccggagtttccaatttgagagaaagaacacggccatctgaaatcttcatgtcgatcgcactggcttgagttgacaacaataactcaaaacactgcatcatcatcattgccaatttttcttctggaattaacgggctattcactaatacgtcagtgagctgttgtaataactgttgcctatctctatcgttcatacggctaaccccattagcaattaagaattcgaagatagcactatattacataaaaaatagtcatgtcgactatataatagcaaaatgttaaacaaacgcagaacgcctacagttaagttactgtatagtaatacaaaataatgcctgatgtttaaggataaaagtaataaatacattattgagcaaaaaattccaaactctattaaatactgtttctatcctttaagaaagaaattcaatattgaactgttaatttttttatattttggtgttaaggtcgtaccttcaccgcctagacatacagtcttaggtaatttaaataaagagtttgtctggtaattacttatgtcacatataatttatttatctttaaatggtaagaaacaaggtttaatttctgccggttgttcaacgctagactcaataggaaaccgataccaacaggggcacgaagatcaaatacaggtattgcatttgaatcacacgataactcgccaaaagaatgtcgatcatcacccggtacaatttatcaagccaatcgataaatcatcgccgctgttagcatccgcaatatcttcaaatgaactagtgaatgcgattttcttcttttacagaacaaatttcgctgggcagttagaacttttctatgaggtcaaattaacagaagcgagtgttgttgacatttcttgcgtctacccgcattcaataaatgataatgaaatgatgccgtacgaaaaagtctttctcaaatatagatccatatcctggaatcacataaccgccggcacatctgcctatagtatatgggatgatagaatttattaataagccagctttaactgattgaatcactattatgaatataaagattcttaatcctcaacacattttaaataattaacaccgtgataataatcacattttaagaataaatgattttttataccctatggatttcaagatgcatcgcggcggcaagggagtgaatccctgggagcatagataactatgtgaccggggtgagcgagtgcagccaacaaagaggcaacttgaaggataacgggtatatcatcaattccagaatattcccttaggaaaacaatatgaaaatcaatctcaacaatatggttaccgaaagtcgtaatccagccagtgccaacattgatactttgccaacccttgaaatgttaaaactaattaatgacgaagataaaaaagtcgcattggctgtagaacaaactttgccaaaaatcgctgaaacagtagacaaaattgccgaagcatttcgtcaaggaggtcgtttaatttatatcggtgccggtacatcgggccgattagggattttggatgccagtgagtgtcctcccacttatggtaccaaaccggaacaagtggttggattaattgccggcgggcatcaagccattctacatgcggttgagaatgcagaagataaccaacaactaggcgcaaatgatcttcaagcgctacactttaactcaaaagatgtattggttggcattgccgccagtggtcgtacaccttatgtcttgggtgccatgacgtatgcgaaatccgttggtgcgaccgttgcctgtattagctgcaacccggaaagcccgatgacacaagccgccgatattgctattgcaccgatagttgggccagaaattgtcacaggttcatcacgtatgaaagccggtacagcacaaaagctcattctgaatatgctgaccaccggtgccatgatccgtacaggtaaagtttatagcaacctgatggtggacgtagaagcgaccaatgccaagctggttgaaaggcagaaaaatatcgttatcgccgccaccgaatgtaatcgtgaacaagctgagcaggcactggctgaatgtgatggacattgtaaaaccgccattgtgatgattctggctggcatcaatgctcaacaagcaaagactttactgaaaaagcatcacggttttattcgaccgacgatctcagccgttcggtaatgacttcctctgctgagaaggagtaagaagatggcgaaaattaaccagtcagtcattgcccagatccttaaagctatcggcaatgcaaataatgtggcgcaatgtggcaactgtatgacccgtctgcgactaacactgcgtgacagtactcaggtggataaagtggcgttaaaacagatccccaatgtgttaggtattattgagagcgacgatcagtttcaaattgtgcttgggccaggaaaagcccaagcggcggctgagataatgaatgaattgctaaattcttctactcctacagcacaatcgaaaccaagcgacactcatttagccaatattgcttctgctaataaaaagcaacttaaagagaaacaagtcagtgcggtacacaaattcctgaccaaattcgctaccatttttaccccactgatccccggttttattgccgttggtctgcttctcggctttgctactttacttgaacagataactattcagggcgttgaacaccctaataccattttggttgaaatcatcggctatatgaaagttttcagtaaaggtatgttcagttttctgagtattctgatcggttataacgcgcaaaaagcatttggtggttcgggaataaacggtgccattattgcttctctgtttgtactcagttataacccggatgccaccagcggtttttattccggtatttctactttctttggttatagcatcgatccacgcggcaatattatcggcgttcttattgccgctattctgggagcatgggtagaacgacaagttcgtaagatcattccagacaatctggatatgatcctcacttcggctattactctgctaatcatgggagccattgcctttatctttatcatgccgctggggagttatctatttagcggcatgtcatggttattccttcaccttaacggcaatccttttggcacggcgatattggctgggctatttttactcgctgttatgtttggtgttcatcaagggtttgttcccgtctatttcgcactcatggaggctcaaggctttaattctctgttcccaattcttgcaatggcaggcggcgggcaggttggtgcagcgctggcactgtatgtcaaagcgaaaaaagactcgctgctgcgcacgcagataaaaggcgcgattattccaggcttgctcggcatcggtgagccgttgatttacggagtcacacttccacggattaaaccctttatcaccgcctgtttaggcggtgccgccggtggtttctttatcggtttaatagcttatttaggattacctgttgggttgaatacggtttttggtccatctggattagtagcactgccactgatgacctcaaacaatggcatttttgtcggaatggcagtgtatgctgccgggctagtggtggcttatatcagcggttttgtactgactctgatcttcgggagtaaaaaaatagaggtgcttaaagccgatgtccaaagccaaaaagaatgaataaatattctttataaccaaaatacaatttactgatgaattacccaagccagattaatggcacgcaggttgccgtcaatatacccatcgtaatattgaacagaaaccaagcattgcgactacggagtaacgtccctatcaatgaaccaaaacccgcccacaccatgccgcacaagaaattaataaacatcaccacgatgctgatcacgatgatggaatagaggtaatgatcaccggcaatactatagctgccaaccgcccccaaccccatcagccaggctttcggattcaaaaactgcaataaccaaccttgataccaccgcaccggcttgataacagcgctatctttggtatccagacgtcggtaactggctgttgctgttttccatgccagccacagcaaatagaggctacctgcaattttcatcaccgtgtgaatagcaggatagaccaacaacaatgcggctattccgaaagccgccagatataaaatcgtctgcatgcccagaacaacgccaaagagtaaccccaaagagcggataaagccgaagttagcgcctgatgaagtcaacaacatgttgtttggacccggcgtaatggaagaaataaataaaaaagttgttaatgaaaaaattaggcttgctgtcatgaagagttacctttcatcctgaacaatggcgtttccctttcacagaaaatatcagtatgttattcaccatacaagataactaacccgaattctgcttaatccgtcattgaaaaatcgtcttctgagtagaaaactttcagtgatggcttcttcaatttaaggcagtaagcaatcaatccacctaaaacgcacaacagaaagccttttatacttcggtggcgggaatgctctatttgagaaagagtttttaattgcccattaatcgtttcaatgataaaacgcttttttaacattatcttatcccactcagcttgcatactcgctttcatgttacgccgttttttcgtgatgaaagtgacatcggttttagctaaatcgtccgccaattcctggctgaggtaacctttgtcaccgtaaagagaacccgttaattcttttgataattcacgaacaggttcccgatcatccacattacccggagtcactttaagcgcgagaatttcaccctgatgattgacaaccaggtgtaatttgaaaccgtaaaaccagcccattgaattttttccgcgctttgctatccccgcaaagaccttatgtcgagggatgcgaatgttatggcagacactcaaacgggtggaatcaataaaagcaatgcctgtgggtttcccttttaattgagtcagatagctgcataatggcaccaaaacggaaggagccacactgacaaaacgaggatagctaagcaaggttggaaaatccttatggtgatatttccaaatatgttctagataaaaatgtttaaaatcacggtaatgcgacatatgaaaaaggatcaaaatggtcatgatttcactgggatacatatgaccttgtcggcggcgtaaacgatgcccgctatcgagacaaaattgttcccattgagggatgaaaaaacggcaaaaatcatcgacatcacagaaaatttcaactaagttgtccatagcctgttcccccctcggagctgtttttggtgcacaccaaaactttgctcctggaacaggcttctcgtcaatttcttatccagaattcgggttaactaatcaatttaactcgaaaccattatgaccgatatctttcgtcctctaaccggagccagtaatccgcatttgcagacactcctcccgcgtctggtgcggcggtatcctgaactgcaaccctattggcaacgacttgatttaccagataacgattttgttgatctggcgtggagtgaagatcccgccaccgcagcacacaagccacgattaatcctatttcatggtctggaaggcagttttcacagcccttatgcccacggtttgcttcatatctgtcagaagaaaggttggcttggtgttgtcatgcatttccgcggatgcagtggtgaaccaaaccgccaaaaacgtctctatcattctggcgaaacaagcgatgcccgttattttctaagctggttaaaacagacttacggtgatgtccccacctcagccgtaggttattcagtcggcggtaatatgctggcctgctatctagcagaagaaaaaatagatgctcagatcaatgctgccgttattgtttccgcgcctctgatgctggcagcctgctccctgcggatagagaaaggattttctcatgtctatgaacgctatttactcaatagcctgaaacgtaatgccacccgcaaattgttacgctaccccggttcactccccatcaatctgtctcaagtaaaaggattgaaacatattcgggaatttgatgaaattgtgaccgcgaaaatccacggctttaaaaatgcagcggactattaccaccagtgcagtgctctgccgcgtctgcctgatattactgtgccactgctgattattcatgctaaagacgatccttttatggcaccggaagtcatccctgatctcaaaatgttacccaaaaatattgaatatcaaatgacagaatatggtggacatgtcggctttgtcagtggctcattgaagaagccacaaatgtggctggaacaacgcatcccaaattggctgtcatcttatctggagcaaccataatgattatcccgtggcaacaactggaacccgaaactctgctaaatttgatagagagctttgtcttgcgggaaggcactgactatggcgaagatgaaaaatcgctggagcagaaagtcgctaatatacgccatcagttggaacggggggatgttatgctggtgtggtctgaactgcatgagagcgtcaatattgtgccaaaagaaatgttccattcttaacattatggagtttactgaatgtctgtcaaacatccgattattgcaattaccggctccagcggtgccggaaccaccaccaccagtttagctttccgtaagattttccagcaacttaacatcagtgcagcgcagatagaaggagatagtttccaccgctacacccgccctgaaatggatgccgcaatccgtaaagccaaagaacaaggcaggcatatcagttattttgggccagaagccaatgattttggcatgctggaaaaaaccatgattgattatggtgaaaccggtgaaggccgccgtcggaaatatcttcatacctatgacgatgccgtcccttacaaccagcttcccggtacatttacgccgtgggaatctttacccaagcagaccgatgtactgttttatgaaggtctacacggtggtgttgtcacaccacaacataatgttgccagtcatgttgatctgctcgtgggcgtcgtgccgattgtcaaccttgaatggatacagaaacttgtccgcgataccggagaacgaggacactcgcaggaagctgtgatggattccgtcgtgcgttctatggatgattatattaactacattacgccacaattctcgcgaacacatatcaacttccaacgtgtccctaccgttgatacatccaatccattctcagccaaaaccattccatcactggatgaaagttttattgtcatccgcttccgtgatctgactcaaattgatttcccatacttgttagcaatgttacaaggctcattcgtttcaagcattaataccatcgtggtccccggtggaaaaatggggctagcaatggaattaattatgacacccttggtgcagcgattactggaaggggaaaagatttgttaatcagcgcctgaggtcaatttagcaaatccggcacttaaaatttgcatcttatattattcagttaaaaaaacaggtaactgaaatattagttacctgatgttattttttgatcacgaaataatatcttaatctatatctttaacttcaaaactgtgggtaatttcaactgatttccccaacatcaatgcaacagagcaatatttttctgctgaaagcatgacggcacgttcaaccgctttatctattaaatctttacccgtaacaataaaatgcagattaatatgagtaaacaagcgtggcggctcttcacgacggcgggaagttaattttacttcacaatctctgatgtcatacctgcctttatgcaaaatagaaactacatcaatcgtactgcaaccaccggctgccattaataccatttccattgggctcggtgccttatcaccggcattaccatccatcatgatctgatgaccggaagatgactcccccaaaagagataatccttcaacccattttacccgtgcttgcataaatacctcttaagtcgttctttgcatccaagcctactctttcagtattaaactggcaatctagtgagcggtttattatgctgaaacaatacaagacaagacagaaaccctttcctgtgttaaaaacagaagtgggctaagtataggtaggttatgatcaatacttaaggttcaaatttcagataacctatataaaacccttatctgtcggtttttcaacaaactaatatgttaagctagtgtctttataagccagcctgacgagaaacttttagattctcgtgttatttaggcagcgataacaacagaggatgaaacgaatggttctcggcaagccacaaacagaccccactcttgaatggtttttgtcacactgccatattcataaatatccatctaaaagtacgcttattcatcaaggcgaaaaagcagagacgctttactacattgtaaaaggttctgttgcggttttgattaaagatgaagaaggcaaagagatgatcctttcctatctaaatcagggggatttcattggtgaacttggattatttgaagaggggcaagagcgtacagcttgggtacgggccaaaagcgcctgtgaagtggctgaaatctcctataaaaaattccgtcaactgattcaggtaaacccggatattttgatgcgtttatctgcccaaatggcaaaccgtttgcaaacaacttctgagaaagtcggtaatctggctttcctggatgttaccggccgaattgcccaaactttactgaatctggcgaaacaaccagatgcaatgacccacccagacggaatgcaaatcaaaatcacgcgtcaggaaattggccagattgttggctgttcccgcgaaacagttggtcgtattctgaaaatgctagaagatcaaaatttgatctccgcacacggtaaaactattgttgtttacggtacacgttaacgcccgattaatcagcgcataatcctgcgctgatttctcctgtatttaattacaccaactgattaattacctgctctaaccgctccattccttgagcaatctcttcttcactaataatcaacgaaggcgtgaaacgcagtacatcgcctcccgcactcaacaacattaagccattttcagccgccagttgcagaatatctttagcttttccctgatgtggcgctttaagttctgccccaatcagcagaccctttccacggatttcaccaaatatcgaatatttctgattgatatcattcagaaaattcaccattaaattatggcgtttttcaactcccgccagaaccgctggtgtattaataatatcaaaagcaacatttgcaactgcacaagccaacggattaccgccataagttgtaccatgagctcccggtgtcatcactgaagcaatattcactgtcgtcagcatggcgctgatagggaagccatttcccaatgcttttgccgtggtaatgatatctggcgtaacatcataatgcatataagaaaatagcttaccagtacgtcccatcccactttgcacttcatcaaacaccaacagcacctgatgcttatcacaaagctcacgcaccccatgaataaatgccggtgctgccgccgtgactcccccttcgccctgaaccggttctaatacaacagcacaagtatggtcatctatgacggccttcactgcatctaaatcattaaaaggcacatgaataatatccgcgggttttggtccaaaaccatcagcatatttgggctgaccgcccacggagacagtaaatagggtacgaccatgaaagccctgatgaaatgcgataattttggttttatagggattgtgacgcgcaatggcatagtggcgagccagtttaaatgccgcttcattcgcttccgctcctgagttggcaaaaaacacccgctcagcaaaagtcgcatcaatcagtttctgcgccagaatcaaagccggttcattggtgaaaatattactgatatgccaaagtttttccccttgctgcttcaaaacatccactaacgtaggatgacaatggcccaaagccacaacagcaatccctcccgcaaaatcaatatactctttcccatgctgatcccatacacgactaccctgccctctcaccggtataaactgcgctggtgaataaattggcaacataacttgatcgtatgtgtttctatctactgcgatatgctccttcatttccccacccgttttttatatatacgccattcagaagtgaaaacataatcaccgaatatgcataaaaaatcaaagatgggcaaatgaaaaagatggataaatgaagaaattatcggtatctggttaatatctcagaaagttgctcagtaactggtgaccttgctcactgagaatactttcaggatggaactgcactccttctagcggtagagtacgatgacgaatgcccataatttcatcgacattgccgttatgctggctccatgcagtgacttcaaatgaggccggtaatgtctctgcggcaatcaccaatgaatggtaacgagtcgcggtcaatggccggttaagccctttgaacacaccttgctgattatgatgaatagcagaagttttcccgtgcatcacttctctggcttttaccacgctggcaccaaacgcctgaccaattgcctgatgtccaagacaaacaccaagaatcggcaacttatccgaaaaatgagaaatcgcagacagagaaatgccggcttcatttggggtacaagggcctggggaaataaccaaatgggtaggcgtcaatctctcaatatcttcaagttgcaattcatcattgcgcttaactaaaacatctgtacccaattcacaaaaatattgatataagttatatgtaaaagaatcatagttatctattattagtaacataggagtctatcctactcatttttatcgctgtattttgttgccctgccactcctgcaatttgtttatcctgcacaactggctccaggtaaaacggcctcgcaacaacggggcggctatcatagcacatcaacatttgtagcatagtacaacaaaattaatggctgttttttcttcaatcaacttactctcataaccctacaaaaaaacatacgctctattttgatattcaataagtaaaggtaattgttatgaagacaaaactgattatagcatctctttttttactgtccttccccacgctggctgttaccaaagccgccaacattttctttccggaaaaaggggtggtttgtgataaaaaaggaaaatattgttctgatcaacaagggctatcgctaaaattaaccgaaagatatttaggtaagaaagcggtaaaacgcctgaaaaaagagattggtgatggaaaagatgtcgacttttcctcttacactttaagtaacggcgtacactgtgagagtaaagagaagaaatgctacaaagacagatattatccacgaaccgaagtaaataaagaatttacccaaaagatgtatgaataacggcgaaactggcctccatttaatgcaggccagtttgttaatctgatgagagttaaccggaagaccagaaactgccacagccaaagtcataggaaaaaattaagggataatctccgcagacagaatagcaacaggtttaaccggtacattctgatatggaccaacgttttccgttttgacttgagaaattttatccacaacatccataccttttacgactttaccaaatactgcatagccaaaatcacgctgaccgtgatcaaggaaagcattatccgctacattaataaaaaattggctagtggcactgtctttatcagcggtacgtgccatagagatagttccgcgtaaattacgcagtccattatctgcctcatttttaatagcagctttagtcgctttttgctgcaaatctttggtaaaaccaccaccttgcaccataaatccagggattacccgatggaagattgtattgttgtaataaccctcattgacgtattcaataaagtttttcgttgtaattggcgctttctggttatttaattccagttcaatattaccctccgttgttgtcagcttcacgtgggtttctcccaccgccaaagccagaggtgccattgcgctcagagagcatgcagttacaagtgctactaaaatacgtttaaacattctgggttcctatattattaaggtcaacaacacaaactgaatcaattctaataatctcttcaacatcgtgcttaatatttacctacatttacgctatcaatcggctggtgctttgaagaaaaatgtatcctttcaataacaggttaaattttatttcataaaccggagcgtcatcagtaacaaaatagcaagcttggttcaacccatcagaaatatgtcattatttttaatcctgtcaaccaacagtggctatcggtataatcccctttgccatatattcagcgcatttctcagggagataatcattttgaccatcaaaaaccacaactatcatatgacccgttttatcacgagcgcacctgatattcgccatctgcctcaagatatgggcattgaagtcgcgtttgccggtcgctcaaatgcaggtaaatctagcgctctgaatgctctgacgaaacagaaaagcctcgcccgcaccagtaaaacgccaggtcgaactcaactcatcaatttattcgaagtagaagaaggtattcgcctggttgacttaccgggttatggttatgccgaagtgccggaagagatgaaacgcaaatggcaaaaagcactgggtgaatatctgcaaaaacgtgaatgcctgatcggactggttgtactaatggatatccgtcacccattgaaagatcttgatcagcagatgatccaatgggcagtcgcaatgcaagtaccggttatggtgttgttgactaaagccgacaaactggcatctggtgcccgtaaaagtcaactgaataaggtgcgtgacgctttgctcgcgcttaatggggatattcaagtagaatatttctcagtcccgaaaaaaatcggtatcgataaactacatcagaaactggatatatggttcagccagaaagccgttcaagttgaaaaccatcgttaatccatcctctctttatacttttacgtgttaaattcagttgaaaaaaatgccccagtcaaaattgactggggcagctaatattcagctaaatccgattacgtgaagtaaaaggtctgaaagatagaacatcttacctctgtaccctacgccaataactctaccctattttatttattagaaaaagcctttttgtaatttattttcagaaattatctcgattcagccaggggttttgctcattttgacgccatgaaatgtagtttaattacatatttatgcgatctagatctaaatatgcattacatggacaacaaatcattacaagtgaatacaaaaaatttatttaactaataatattacttagtgtaaataaaataactgttacactttctcccaattgggcatggttttccgcataaacgccttgtggactaagaataaatccgatacgaccttaaccaggagaataataatgaaccaacatgataatgcttcatcaggtataaatcacaatagtaactctccattagaatgggaagaaaacgtctattgcagcaataacatagctctcgcatccaccatcggagcaaccgctatgttattgcagaatggcagtgtaattacctggggacttacacatcttggcggtcaagtcccacctgacattgctgtattacgagatatcgttagcctgagctcaacacaatacgcattcgcagctttacgggcagaccgcagcgtggttgcctggggagattcagttaacggtggacagcttcctcccgacattgctcaactaaaggatattgttagcctgagttcaacggctaacgctttctcagctctgcgagcaaatggtagcgtagttgcttggggagataatcgctatggtggccaagttacaccagaagttgcccaattacaggacattgtcagtgtaacttcatcaggtaatgctttcctggctctgcgggcaaaccgcagcatagttgcttgggggcgtttagctggcgtgctcccacccgagattacccaactacaggacatcgtcagtgtgcttggcaaaaacgacatgtactcaaccttcgcggccttacgggcaaaccgcagtgtggttgcttggggatattcactgtttggcggtcaggttccaccagcaattgctcaattacaagatatcgttagcctgagtcaaacaggtactgcattcgcagccctacgggcaaaccgcagcgtggttgcctggggaaatgcaagcaggagcggcacagttccgcctgccattgcccaactgcaagatattattaatttaatcggttcgggcggcacatttatagctctgcggtcaaaccgtagtattgtcgcctggggagacacgccaatcccatcagaaattgctgcattaagcgatatcgttgacctcatcacaacaagttcagctttcacagccctacgaacaaatcgtagcgtggttacttggggaacaatagagagtattgagcaggtcccatatgacgcagcccaagtacagaatgtcatcagcctgagtgcatcaagtgatgcctttgccgccctacgagcagaccgcagcatagtcgcctggggagatatatacaatggtggaaaaattccacccgaaattgcgaacttaaaagacgttatcagcctgacgtcaacaccccgtagtttttcagccttgcgagcaaacggcaaaagagtcggctggggaggcggagattttgtatcacatggtgaatatgactaatgcatcattacgcatggcttataatcacttaacatgttaaaccaaaggggaaaaaaggcttaacatactgcgttggcatcaggaagaaccaatgtcccaacgcagttgctgatattttttaaccttatcatgtaagttccgcagtttttcgatgttgtcaattgactcactcatgctgttgaatcgttaccctgcccacataacatccaacctacaccatcaactaatgactttttcctattacacttttttgcattaatacattaatattttttaattagagtagtcatctaacttagcccgtatagggacaagttttacaatacagactccctgtgggtaaaggtaaatccgatataaccttatcaggagagtaatatgaaccaacatggtaatttcttgccgggtacggatgccgaagacagttttataacacagcaatggaaatctgccggacatagatattatagcaacaataactacgattatattgtcactaacaataaagcaacagctatgttattacaaaatggcagtgtagccgcctgggaaagctccaactgggacggagacttatgggggccaagtacctcctgaaattgccgcattgcaggatatcgtcaacctgagttcaacacgtggagcattcgcagctctgcgggaagaccgcagtgtggtttcttggggagatctttattcaggcgggcgaatgccgtccgatattgctaaattgaaagatattattagcctaagtgcaacacaattggcatttatagctatacgggaaaatggcaagagagtagcttggggaggtggggataccagagctcatggtgactatgattagcagagctattaaacattgctatttattgtgaacagttcaaaaaaggctgagccaaatacacagctcagccatcgcgggttaattcagaatatcaatgcgcctgatcccaattgtcaccgatacctacatctactttcaatggaacatcaagcaccatactcttctccatcaattcacgaattttctgttctgcatattcaagttctgattcatgaacctcaaataccagctcatcgtgaacctgcataatcatacgaactttcggttcttcactgacaatccaatcatccaccgcaatcatcgcttttttaatgatatccgccgcagttccctgcattggcgcgttaatagcttcacgctctgctgccttacggcgcatggcattgcgagatttgatatctgacagataaagacgacgaccatccagcgtttcaacgtaaccctgctcttccgcttgtttacgagtacgctccatatacgccaatacccccggatagcgctcaaaatagagatccatatagcgttgagcttcaccacgaggaatacctaactgacgggaaagaccaaatgcactcataccatagatcaaaccaaagttaatcgctttggcactacggcgctgctcactggttacctgttccagtggcaaaccaaagacttccgccgccgttgcccgatgaatgtctttcccctcagcaaaagccttcaacaacccttgatcttgagacaaatgagccattatccgcaattcaatctgagaatagtcagcggccataatccggtaaccttcaggagccacaaatgcctgacgaatgcggcggccctctttattacggacaggaatattttgcaaattaggatcacgtgaagagagacgcccggttgccgttaccgcttggtgataggaagtatgcacccgtttggtcagcggatggaccatctgcggtaatttatcggtgtaagtggatttcaattttgccaacccacgatgctctaagatcactttcggcaatgcatgggtatctgccaactcttccagtacctcttcattcgtggatggcgcaccatttggcgttttctttaccaccggcaattgcaatttttcaaacaatatcgtctgtaactgttttggcgaagccagattgaaaacttcacctgctaattcgtgcgcttctttttccaactcatccagacgggcagtgatctcttttgaatgctcagccaaaatattggcatcaataagtacacctgtacgttccatgcgggaaagcaccataaccagtggcatttctgtattcaggaataccttttctagcgtcggcgctttctccaattgcggccacatagcctgatgcagcaataaagtaacatctgcatcttctgcggcgtacattgcggcctgttccaccgcgacctgattaaaagtgagctgatttttacctttaccagcaatctcttcaaaagtcgtggtcttatgattcaaatggcgttcagccaagctatccatatcatgccgacccatgcctgcaacgctattaagtacgtaagattccagcatggtatcgtaagcaatgccttgcagttcaatgccgtaacgcgccaacacgccacgatcaaacttaatattctgaccaattttcagcaggttactatcttcaagtagcggttttaatgcagccaacacaacttctctgtcaagttgttcaggcgcgcccagatagtcatgccctagaggtagataagccgcatcgccggcagaaattgcgaatgacacccccaccagattagcagtcaaagtatcaaggctgtcagtttcggtatcaaaagcaaaaacagacgcttttttcagtttctcaatccactcatcaaagctttgctgatcaagaatagtctgataattatcagaagagagtgtggccgccgcagatttatcctccgtcggagatgattcatcattaccagtggataccggttttttgcctttctctgccaaccaatcgccgtttgccacatcacttaaccaacgtttgaactcgtaacgagaaaacaactggtgcagtttctccgtatcaggctctttgactgacaaagcaacgcaggttttatccaactcaacatcggttttaatagttgccagttgataggagagataagcgacatctttatgctgcaccatcttatccgccagcgttttcgccccacggaaactgagcccggcaattttatccagattggcaaagatatcatccatgccaccaatcccttgcagtaatcccagtgcggttttttctcccaccccaggtacgccaggaatattgtcagaagagtctcccattaatgccagaaaatcgataatcagctccggcggcacaccatacttttcaacgacctcttccggccccaaaatggtgttattcatggtattgataagcgtgatattcggcgtgaccagttgcgccatatctttatcgccagtgctgataagtaccgcacgcccctctttttctgcctgtaacgccaaagtcccgataacatcatcagcttctactccgggcaccaccagcaatggtaatcccatagcttcaaccatctgatgtagcggttctatctgcgtacgcagatcatccggcataggaggacgatgagatttatactcagcgaacaattcatcacgaaaagttttgcctttagcatcaaataccaccgctacatggcttggtttgtactgcattatcaagctgcggagcatattcaatacaccatacatggctccggtcggctcccctgcgctattcgtcagcggagggaaagcatgataagcacgataaaggtatgaggagccatcaaccaaaatcaggggattgtctgctatctgagccataaatcttcttcattatctgtatttgttacgggtgtgataaggaaataggatgccacagcaagaagtaggaaacgaactttatgtgaattttcttttgaaacccgattctgatattcacatcctgctataaaatctgtggataactttgtgtatagatattacaagttttatttagctattgatcgttgataaaaaaaacttatcaaccttaggtaaaaaatcaatgacttataatcttagtcataaaactgtcatattgccttatagatcacggagttgtggatataaccagagtttgttttacataaaatctttttagcatgcattgtgccaaagattctcaagttggtgggtaggccgtttgtgatgtaacttacttttgccttaccagaagttgttcgatttcaatgtcaattcttgcttttttatatcctttataaataacttttcataattataatacactcactctttttattctctgctattcctgtagggacatgaatttaaaaacgttttcactttctcaagcaattgccacatatactgacagccatgatttcgtgtcaccgtttcatgtaaggattgccacagacgctcaattttattcagccagggtgaataaacaggtaaaaacaacagattaaatttaggatgacaagccagccaatctctgacccgtcggcttttatggatactgtaattatccaaaatcaaagtgagggtttcagcatgacaatactggcgttcaagttcttccaatacattgataaataaatgagaattcttatttaacccgtcagcataagtcacttttcccgtttgaacattcaggcaacctgcaaaataatgtttttggttttttcctggtgtcactatacgtttctgttgcccttttaaataccagtcagccccgatttttggattcagctcgatgtcgacttcatcttcataaaaaacgggatgtttttctgaacacgttgacaatgcctcggtaattttcgccattttttcatggtactcgggatcgggtaatttaagcgtcggggctgcccttcgccacacgatacccattttatgtaagtaacgatagaaggtactgatggataattttatgtttaataattcattgattttaattataaaaaactcaagactccagcgagaacgcaggcagcccaattgctggggagaatattgcaataaaaaagacagtaaaggataaagcgggattaaattccagacagcgggtctgcccacaggcaggcttttgagtccttccagaccatataaagtcaaccagtttatccagcgatagacagaagaacgactggcgcaaagggttttggcgaccagagagacagactcgcctcgatgcagcatcaatatggccatgagcctgcgagcataatctttatctcgggtgttctggataatttttttcatctggcgtcgttcattgcggggtataggtgctatgataggcataactcagtccgtttagtggtttgggattatctacaattgatcagattgcaaaaattggactgagttccctccaagtgttctactattttgaaaagttatttataagcacgtgagtagtgttaaatatgagtgaaaacgagatttacagacgcataaagcttgcttttgacaaagcgccaagaaaccagtttacggttgagttacatttgcaaatgctcaaacatgccgacgaattaaaacacattatagcgagggagttttgtgaaggtgtaagtcttcacccgagcttcggcacggagtttagtaaaatgcgtaatttgacctctcatcttaaagctgctggtcttgacacgaatcttctttgaacaaaatatttttggaggagggtattaatgagtgacgacacttttgaatatggcagccggtggctcaagacggattttcatctccatacccgtgcggataaagagttcaaatacacgggtgcagataacgactacgtaaatcaatatgtacattcgctaaaagatgccgatattggccttggtgtgattaccaaccataacaagttcgacatgtctgaatttaagagtctgcgcaaaaaggctcaaaaatctggcattggtctgctgcccggtattgagctctcggtaaaagatgggaacgcgggtgtgcataccctagtggtgttttccgatgagtggataagcaacaaggagcaaaaaaattatatccaggactttctcaatgtgacctttgccgggaaagctaattttgagcaggaaaatgcgcgttcgaatcacgatattctcaaaaccattaaaattttggatggttatcacaaagactactttttagtttttgctcatgtggaagcacccaacggtttatggggtggtttattgccgggtcggataaaagaacttttcgacaatgcttttgttcaatgcagagctttggcattccaaaaggttcgcacccgagatgagcgctctaagatccagcaagcactgggtgacttatatcctgctgaagtggaaggttgcgatgctaagaaccttgccgatatgtcggccagaaaggaagccagctatctcaaactcggcgcgttcagctttgaggctgtaaaatttgccttgcgggataagacatctcgcgtacaagctaagctacctgactatcaccattcgtttattcgtaaaatcagttttgaaggtgtgggcaccttgggtggcactgaaatctgtctatcacgggaactgaatactctgattggtattcgtggcagtggcaaatcttccgtattggaaggtattcgctatgccctgaatatcccgtttggcgataagtcctctgacgttgaatacaaagaaggtttagtaaagcacctgctatgtagtggcgggaagatcactatcgacgcgattgaccggcgaggccagccttaccaaatacgtcgtatattaggtgaacgccctgatgtatatgttaacgggcaattacagccgggtgtgtcgattcgagaaaccgtcctacatcaacccatttactttggtcaaaaagacttgtcgagtactggcgctgggtttgaaaaagacctcattgaaaagctggttggggaagctttaatttctgttcgccaaaagatagagcaaggccgtcagcgcgtagtggatgctattgatcaaattaaacgtttaacccgtgatgccttgcagaaacaagagtggctgcaaaaaaagcaggatgttgagtttaagttaaggttttaccaacaacacggcgtagaagccaaactgcaaaagcagattgattttgatcgggatgagcgcaaagcgcagcagatgatccaaggggcacagcattatctgaccgagctaaatagctttattgccagctttgaagatgaactgaaaaaccagattctgtataagtcagcacagaatcagcctttttttgatggcttttttgcggtctatcaacagttgctcactggctttgatgaaattaagcaagtggctggaagtgaccaagcgacagttcagcaattgcagcaaaagctggtgggctttcaacaacaaaaacaagcgttgaaagaagaatttgcagaaatcgagcgcaagttagccagtgagtttcaacaagcgggtgcacaagcaatcagtccgcaagagtttaagcagtttaaaagtcagctcgatcaggctgagcaaatgctggctgtattgaccaagagtgagcagcaatatacggatttgaatcaaggggttgaacgggaattagttcaactgaatagtctttggtttgaagaatacggcactattgagcaagtgctaaataaaatcaatcgagtggattcgccgttaaaaattgtgccgaaatttaaagataacaaagcggccatgctcaagcatattcaggatttataccgcggtagccgtattcgagaagctacattgcaaacagtggtggacgagttcagcgattttggcgcggtatggcgcgaaaaggataagttgaaagcgcagcttggtggttcattcgataccttctgtcagtattttgaagataatctagacgctttgctgacttggcaggtgccgaatgttttcaccattgaataccacggtaaggctctggctcatcattcattagggcagcgcgcatctgcattaatactgtttgttctaagccaacaagaaaatgatattgtgatcatcgaccagccagaagacgacttggataaccagacgatctatgacgatgttatcaagctcattcgtgagttaaagccaaaaacgcagttcgtctttgccactcataacgccaacattccagtgttaggcgatgctgagcaagtcatcgcctgtgaatatcaggatgataatatcaatattgtcagtggcagcattgactgcgcggatgttcagcagcgtatagtcggtattatggaaggtggtgcagaagccttcgagaaacgtaaacaggtatatgaagcatggaaacccaagagctcttagcaataattgcacgtgatgaagatagccgtcatcaatttaaagcagacgtcaacaatgcatcttcgttgggtgccgaaatggtagcgttttccaatggtactggaggcttaattctcattggtgttaacaatggcgatgggtctcgatctggattgacgagagaagatatcggtcgaattaatcaagtcatagcgaatgctgctacaaataatgttcgccccccaataaatcctgttactgaaaacattcaactccccgatggcctggtcattgctgtacatatagagcaaggcatcagtaaaccttatatggatactcagggctatgtttgggtgaaaaatggttctgataagcgaagggtgaccgctcgcgaagaattgcaacgaatgtttcaggaggcggcactgattcatgcagatgagacgctggtaagtggtacgtcagtagccgacatcgatcaggagttctttgattcgttttttgagggggaatacggagagagggttgaggagcaaggtgtatctcgctctcagcttttagaaaatatgaatttggctaaaaatggtcagttgaatatttgtggtactttgttgtttgcatcgcggcctcagattcgtcttcctgtttttatcgtaaaggctgttgccttccccggcgtagatattgaagatgagcactatattgatagtcaagatatcaatggcaagctgtcggatgtgttccaaaaggtgctggggtttgtattggcaaatatacgacatattcaaaataagcaaagctttaactcacttggcgagcctgaaatcccgaggattgttttagaagaactgatttccaatgcgcttattcatcgcgattactttgtgtcagcccccgttaaagtgctggtttttgcagatcgaattgaaattattagccccggccacttacccaataatttaaccattgagaacatcaagatggggaactctaatattcgtaacccaatcttggcttcatttgcttctaaggtattgccatacagaggcttgggaagtggtattaaacgtgcaatcaaagcatatccagatattgaattgattgataatagggaggggaatacattcaaagctatcattagccgaatgttactcaatgagtgactccaaatcacttcactgaatattttccgcctgtattttgtgacgaaaactggcaaaagcagaaatccggtacctgagcaatcagactgtcgcctactaagaggaatccccctcctgagtcacgaagtgcaaaggtgggggagaatgccaaattattacttctgacttaacaagaagttaacaacatctgaatagggtttcgcatagttatcagcagaagtggcatcaatgccgtcatttttcaccatatacttgccgttaacaaacattgccggtacacctcgcaattgcaaatcctgagcggctttttgctgcttaacaactaaggatttcaccacaaaactgctcatagcagcatcataatcctcagcagtcaccccggctttgataaaagcattgcgaatatcattcggagtcttaatagccagtgttttctgaatcccctcaaacagcaccggagtcactttgtcttcaacacccattgccattgccgcagcccaagcagtagtcaattctttacccagtggccctaaaaaatccacatgataacggacaagttttgtcccttccggtaaatgctgtttcaccgtctgaggcactttaaaaatctcttcaaactgataacaatggggacaatagaaagagaagaattctagcaccggtggttgatccgctaccggcgatttcaattcaacatactgttttccttcagtaaaattggcggcagatacgctaaatgccataaccattccgactaaagctaaccacaacttcttcataactatctccatgataaacattaatacatcgggttaagctgcaaaggtgattcctgcaacagcttaatctgttcagaaaaaagtgacgtctgttttaaccaaaaatcggtatctgccatccaaggaaatgctttgggaaaagcaggatcctgccaacgtcgagcaacccatgccaaataatagatcatccgcatagcacgcaatggttctatcaatgacaattccttcggatcaaaatctgcaaattcactataggcttccagcagtgtatctaactgcaatagctgttcctgacgagagccatgaagcaacatccataaatcctgaattgctgggccgttacgcgcatcatcaaggtcaacaaaccaagcttcgtcacgccacaagatattacccggatgacagtcaccatgaagcctcaatatttgccaatcatcgcgccaatttgatgctacagcatttatcaaatcatccaatactgccaaaaattgccttttctgtcccgcagggaccaactcacatgcagccaaatactgtcgtggttgatgcagatactcatttaacccgatagttggacgagaagtgaatttttgccgacggccaatctgatgaattctccctagcaaacgccctacatcctctaactgaaagagattatcggattcatactgacgccccccaatgcttggaaaaacggcaaaaaagaaatctttaaaagtcagtaaagtttgcttattaaataccaaaggtgccgcaacaggtaaatcagcctgttgtaacgccaaagcaaaatcgtgctcctcctgaatctgctgctggttccaacgtagtggccggtaaaatttcacaacataacgtttacgatcttcatccgtaaactgataaacacggttctcataactgtttaattctgtcagcccggaatcgacatacagcccggtctgcaccaatgcatccataatcaaatccggcgttaactcccggaaattaaaagcagactggtttgttagcacattctattctcttgattaatctgtaataacggctatacaaattaacagggatgaccgcccagagaaaggactgctctgtcaataagcgtaaagatgacccttttatcagcaagttatccggtgatcttatttaaaaacgcttacttaaccccacataatcaagctgaaaaaagttatattaacagtaataactacctcagttgataacttgaacattatgcaaccaaaaataagcggcgcgatccttgctggaggtcgcgccacccgtatgggcggcaatgataaagggttaatttttttaaataaaaaaccactgtaccaacatattgcagataagctatttccacaagtggatgaattaattatcaacgcgaaccgcaatctggatatttaccgacaaagtggttatcacattgttccagatttaacaccagacttctctggccccctttcaggcatgctgacagccctaaaatcagctagttacgattgggttatatttgttccttgtgatgtaccagatctccctaccgatttggtcattcgcttatggcagggaaaacagcaagcattggcagcctatgtaaatgatggcagccgggctcaccctaccatcgctttactacaccgcagtctgacttctcaattagaaaattatctggctaacggtgatcgtaaattgatactgttcatgcataagatcagagcgatagccgttcaatttgatgataatcccatcgtctttactaatctgaatacaccgcaagattgccaacattgggaacatatacaggagatcaaaaaatgagagccaaaccgcttccgctactaggtattacagcctatagcggaacaggaaaaactacacttctcaaacaagtgatcccactattacgtcaacagcaaatccgggttggtctgataaaacacacccatcacgatatggatgtggataaaccgggcaaagacagctatgagctgcgcaaagccggcgcagagcaaactctggttgccaaccagcaacgctgggcgttaatgacagaaacgccagatttgatgaaaatagatttgaactatcttgccagccgttttgatccagattcactggatctgattctagtggaaggttttaaagatgagccaatcaacaagatcgctctataccgcaacactcttaaccaccgattaaacgatcttcttgatcaacatgtgattgctgttgccagtgatgaacaattggagactattttgccacaattgaatatcaatcaacctgaacaggtagctgattttattgtcgaatggctgaatatggaacgttaagtcacttccgcctgcgcccagaacacaggcagaagaccaaaaacaactattgatgagggaataattgaccagctgtattgttaagacaacgatgctttttggtataaaggcataacttgctggtaaaccttatcgtatagatttacttttaacaagctgtatttttcagtcattgtcaatgttttaaatccatctgtttctctctcaaaagaaactgaaccgataattagctgattattagtcgatagaccatcaatacataaatcgaataattttttcgtcgtatgtggatcagggtcttgttgtttaggcgaatcaattaccacaggaagcatagggcttgttgacttatcttctatcgttttaagaagagcatagtgataagccaatattgctctaggagcacgactgccagtttcactcttagatatcggaccatactggagaatagttccaacttttgggtctttaatacctaactcagtttgtgcgaacttcaatgattctttaaatttttcattgatttcacttgttcgttttttatcatcgaactctgctatttctttcgagagtttggttctggcaacatctaattcacttattttttgtagcaactcattaatttgctcatcgaaagtgaattcaacctgcttacttgcttgagattttataacgtcttgaagagttaactgttctttaacttcttgaagcatacctttaagctcagagcttaatctttgagcatttttcaaatcttctttgatactggcaatttgctcatcatatactgacttttggtcatacaattcaggtatgatttgcaaaagcttctctctattttcaagtacagcatacttagcttctaaacttgccgatgtagatagagaatcgatgttattttcataaagttgtctttttgactcttctatctctgccactaattcgtctcgttgagataagactttgattagtttgattctgtaccctgtttcttccttatgcaagtattgacacttacgaagaaaacgctctaataattcttcataatattcaacatcaacatcaaaaagtactcttccgaatgattcttcgaaacgcttcttagctgcttccagagcttttaatgttgctctgatttctttaaggtcgatatcaattaaattgattttcccttgaagtttgtaatactccttgggttttacaccagcatggaagtttaaaatatttttctgccaatctttgtacattttcaaactactgaatgaatctaatactgtaccccatccgttatcttggtcgatatagaatggaagataaagacttgcaggttgtgcttgcccttgaactaaagtttcctttaagactaattctaaattaaagtcaaagatatctcgtacagtcaatgcaatatctgtacgagaattagaggtcactaagaggtgctcttgttcttctgtaatatcgaagatggaaatacgtttttcgtgacgaataaatgcatagtcacgattattaacgcaaataacaacttttgaaacaaagttatcatccttccactttttatccagtcgaacatcggcacctaatgtatgatataggctcttgataaagctagatttccctgtgtcgttctcaccagtaatgatatttatgtctggtgagaactcgaaaaagaagcctttcttatcacgaagggataatatgtgagcacttttaaagtagatgcttctcataccttacctccctctaatagcttctggattattgagtaaacaacaatacattctttctttcctgactttaaggccaatgtataatccggacaaagtgcatcaattttgtgaataattccagttacatacattttcaaatccgaataaacgctcgcctcatcgtaaaggttaattgcatattctagatatacagtcgacggattctttgtattttggttaaggtcgatacaaacttgtgagaacgtcgcttttagcggaataatctcaaaaagagtcttaccgaggttgttgaatatagtttccgccattttccaatcaggcttcatactattacttacattcaatgagtctagaacaccattaaatgctcgggatgaaaacccttttcgagatataaggtctgaaaaatcaacgatatcagctgattttaccttagatttgtttctacattctttttcaagcaaagctgctagcacatttacacttaatgtagtgtcatcaccgaatttattacaaaggaaatcgcacagtttaccttttaagtgtgtgatgtggtcatctaggcttaatgaggattgaacaaacttcaatatagaaagatcaatgttttcatcatcgagcttcacttggtctttgattgcttgtttgaagctaatcttatgctcatcttttatttcacttgcactaaataaagatttaccaccattcttctcacataaattaaatgacgcattagtcacaaacaatagctgaggcgagtagttacaaaagtttctatggtgaataaatagcttgccaattatagatattggttttctctttgtgcttttgtgtaaatcataagcagtccaatgtgattcactggtttttacctgagcaaaagtgaggtctgttggagagtattcatcatctaatattagaacatcatcatgatactcgaagataaatacatagttttttccatccagttcatattccaacatttgagacaaagcccaacaggtctgatagtcaaaccctcgttgagcaatctcaccacctctttcagactgtggaatactaatcaaagcttcagctagccccataaacttccttatgctttgccaaatggacatactcaatcacaatgcttattagattggatgtgaattgtagcataatcaaaaactggggttaccttattcttcttacaacacgcggtcagacaagtttcaaatgaatttcccagtccccgtgaacgatattattgtcaaatctcaacatcactacattgacataaaaggccagaaattactctggccttactaggtttttccagtgggagaaacgtgtgtaggtaggttttctacactaccccctcatagtaacaaactcttccgccgcagtgggatgaattgcaaccgtgttatcaaagtctttcttcgttgctcccatcttcaatgcaacagcgaaaccttgcagcatttcatccattccgaagccgataccatgaatgccaacaatcttctcttccggcccgacacataccaatttcatccggcacggctggcgatgttgagtgacagcggtatacattgcagtaaaagaagattgataagttttcacctgttcttcaccaaattgcgctttcgcctgaggttcagtcagccccacagtaccaataggcggatggctgaatacgacagttggaatattggtgtaatccaaatgttcttctggtttattgttaaacaagcgctcagacagacgacgacctgcggcaaccgcaacgggagttaactccactgcaccggtgttatcacctactgcataaatccctttcacatttgtgttctgatattcatcaactctgatgtagcctttttcattcaactcaacaccggctacagacaggttcagattatccgttactggttcgcggccaatagcccagataagggtatcaacggtttgttctttaccattttgcagttgcaaggtcaggctaccatccgcatttttacttactgattttggcaccgattctgtatgcaaagtaggtccttcggtattgataacttccaagagtgtttcaacaatcatcggatcaaaagaacgcaacggtgcatgttgacgcacaaatagatgggtttcactaccaagagcatgcaatacaccggcaatttctacggcaatatagcctgcgccaacaaccgcaacccgctttggcatctcttccaatgcaaaaaaaccatcagaatcaataccatattctgcccctggtatatcaggccacacaggacgaccacctgtcgcaatcaaaatatgatctgcggtgattttttcaccattcacttcaacagtatgtgcatcaacaaaacgggcaaacccctggatcacatcaactttattgttacccaagccacgcccataagactggtggatacgatcgatataagccgtgcgactggcaatgagtgtcttccagttaaagcggttgattgtcgcatcaaagccataatctggcccatattggtggatagattcagcaatttgcgccgcatgccacatcactttcttcggaacacagcccacattgacacacgttccacccaatgccttagcttcaattagggcacatttctgcccatacatagcggcacggttaattgatgctatgccaccactgccaccaccaatcgctatatagtcgtaatgtttgctcatccggattgtttccatctaatcaattcaagggggttaatacccaaagcctattatggcaaaaaatatcaagcagtcgcgatggttttggctctcgctgccattgttaaaagctattctggcaccacccatttaaccaaggtgtgaccaattccttctggcaccagaacctgatgtaaccacggcaacactgatttcatctgctgttccagtttccaaggtgggttaatcactatcatgccagaggcggtcatgcctcgttgatcgctatcaggccggacagccaactcaatttgtagaatacggcgaatgcccgttgcttccagctctttaaccagtcgtttaatctgctggcgtaataccaccggataccacaacgcataaacaccggttgcaaaacgcttataaccttcctgaattgcctgtacaactgcctgataatccgatttcagttcataaggaggatcaatcagaatgaatccgcggcgactcagtggtggcaattgtgattttaattgctgataaccatcttcacgcaaaactctggcgcggttatcgcgggagaattcattacgtaataaaggaaagtcactcggatgcagttctgtcagattgaacttatcatcttgtcgtaacaaatggcgggcgattaaaggcgatcctggatagtaacgtaagttgccactctgattcagtgcagctactgcactcatataagcgttcaactcctgcggtaaatcttcacgctgccaaacgcgggcaatcccttccaaatattcactggtacgttcagcatgttcactactgagttgatagcggcccgcaccggcatgcgtatccagatagagaaaaggtttctctttttctttaagagattcaatgatcaagctttgtacagtatgcttgagcacatcggcgtgattgccagcatgaaaactgtgacgataacttagcattaatttcagaccccagagcagagaataggttgattgccagatggagtacctgacaactaaaaacccatcccagtagatgggacagatggtaaggccctattatagccctattagcgacaaaaatgtcagactcctcatctttctcctggagatccctttagtcatattaataaaaatttaggataagtgaaaaactctacccagaccaatatgatatttaataagtaatactatttacatttccactaaaaatcataagtaatacttacgtaatgacaaacaacaagaattgtgcaattaaaaaaacaagacattaaacgaacaattaaatatacaagatcttatgttgatgttcacaaaatcaccaatcaggaacagagattgaaaaatgttaacactcgctatatggaaaaataattaaaagaaaagccagaaaaaatgacttaatgttatcgagaacattaagtaatatcgttaaatagtacgtgtaaaaaatgaaagggagagaaagaaaaaaaatcaaaaaagctgaaagaagttgaagacagttattaaaaatcttcaacttaaaataaagaaaaattaagcttttcagccaatgaagagatatttcattggctgaatgattatattacctatcaggcaacaataggtgcacgccaatcatctgcgccggaagtacctgcggttgtatgctcccaattaatcttacgataagacagagaaacacgaaccagctgagtaaattcagcttttgttgggtcctgacaatgaggcatttggcaatcaatgtcgataatagtggcatcttccaactgcgtcgtgaagaaatgctcttgtttcccttcaacagaagtgcgataccatttcaatactacactcgtcagcatttcacccgaagccaatgcgttataaagcaatggaacagatttatttaatgcaactgtaaaacggaatggtttatgagcacgctgacctgaaggctgacctgattgaggatcagtgggtacggtgacgacatgatcaaatgcttgaactagcatttcatcttcgtggccctgaacgtaaatattacccactgattcagcagtgaatgaacccgcagtaatattaccctgtgtttttccggtgatagaaatataacatggagttggcattgcaaatatcctttatagagattgtgtcaacattaaggtaacgctcatattaatttcaatagtgattatttcatcttggaagaaatcacttgcgaatacattgaacgctaaaatgaataataaataccaacccgctcgtttcaaaataaaatctaaattgcaaaattgttaatccatcaccaacaaataaaaacattataattaatgccatttttaaaaaaaactttgaaattgacttaatttacagaacaattaactgttaacactcatttaatctagagataggatgacatatccatatgaaatataaaaactttgataattccaacctaaattatattttgatcaattaaaaattgataactggatcaaaaaattaaacatctccacttggttaataacggaaataatattttcaatatgaaactaactctaatatgtaaacaaaaatacatctagaaatactttgttacaaaatgaaacaaaaaatcattaaaataccttttatagagtactttaatcaagaagtggattaagaaagcatcaagtcgtaactgattgccaaatcaaataaaatcatcaaaaggctaaatagaggggtatatctacatatattttagctttacaataaaaaaacaaaatgcgacactccgctttgcagatcgctctatattgatgctattgttcgatgaataagaacattctgaatgtcgtatttatctatatgctcataaaagccagcttactacccaatttaatgcagtgaatctcccgttttttaatctaggggaattttatgttctccatcacatataagtaggtatcaagggcaactctctcatcaatattgttatcagataattcctaattgcctaattgtattacccaaaggattttaatatgagtaaaaatagttcaggtagcgtagcgccaaaagaaaggattaatatcaaatacgttccgaataccggtgatcaagtagccgagattgaattaccccttaacctacttatcgttggtgacctcaaaggaacaaaagaagatacgccaattgaagaacggcaagctgtttctgtgcacaagaataactttaatgccgtgatgaatgaagccaatatcaatctcacctttagtgtccccaatcgcctcaacgataataacggagatgacctgccaattaacctggaaataaaatcactcaatgatttctcacccgataacgtagcgaagaaagtgcctgaattaaataaacttttagagctgcgtgaggcacttgtcgcactaaaagggccattaggaaatattccggcattccgcacccgcttacaagagttattgggtgatgagaaagtccgcgaacaacttctaaaagagcttgaaatcgtcaatcaaaagtaattgactgaaaaggagtttttaacatgtccttgcatgaagagagcagtacaacattaaccccagggtccactacctctttgcttgacgagattatgtctcaggcaagaatgacgccggaaaatgatggctaccatatcgcaaaacaaggtgttgccgcttttatcagcagcattttggataccggtactaacgaagaacctgtcaacaagcttgtcgttgatagaatgattgttgagcttgataaaacactcagcactcaagttgatgaaattatgcatgccaaagagttccaagagctggaatcatcatggcgttcactgaaattgctggttgatcgtaccgattttcgtgaaaacatcaaaatcaacatcatccatgcgaccaaagaagagttactggaagatttcgaattttcaccagaaatcatccaatcaggcttatacaaacatgtctactcaacaggttatggccagtttggcggcgaaccggttgcggcggtcatcggtaactatgcgtttagcaatagctcacccgatatcaaactgatgcaatatgtcagcgcggttggcgcaatggctcacgcgccattcctctcttccgttgcacctgatttctttggtatcagtagctttaccgaattaccagcgattaaagatctgaaatctgtcttcgaaggcccggcacacaccaaatggcgtgcgctgcgcgaatcggaagattcacgttatctcggtctgacaacaccgcgcttcttgttacgtctaccttactcaaccgtcgaaaacccaattaaaaactttaactatcaggaagatgtcagcaaagatcacgaacatttcctgtggggtaataccgcttatctgctggcaacttgtttgactgacagcttcgccaaatatcgctggtgcccgaatattatcggcccacaaagcggtggtactgtcagcgatctaccggttcacctattcgaagcaatggggcagatccaagccaagatcccgacagaagttttagttaccgatcgtcgtgaatttgaattggcggaagagggttttatcactctgacgatgcgtaaaggcagtgacaacgccgcattcttctctgccaactcagtccagaagccaaaagtgttcccgaatacccgcgaagggaaaatggcggaaaccaactataaattgggtactcaactgccctatatgttcatcatcaaccgccttgcacactacatcaaagtgttacagcgcgagcagattggttcctggaaagagcgtcaggatctggagcgtgaactgaacacctggctgaaacagtacattgctgatcaggaaaatccaccaacggatgtccgtagccgtcgccctctgcgttctgcccaaattcaagttttggatgtggaaggcgatccaggctggtatcaagtggcaatgcaggttcgccctcattttaaatatatgggagccagctttgaattgtcactagtaggccgtctggataaggagtaatgggtcatggctgcgctgcacagttggaatagagaaggctctgccagcctgttcgagcgtattcaggggaagaactctggttcttcccgccaatcaagaatgcgtgagctgctcaactccataaaacggcacctgaatcatgttctcaatactcatccgggtgcctgtcagagtgcggctgatcttggcgtcattgatctcaatgacgctacaaccacggcaactgactttaaacagagtattgagcaagcaatagagcactgcatcacaaattatgaaccaagaatatcgtcagtcactgtcaatgcaatccacgatgatagtgatccgctgttgttacgttttcacatcagcgcccaggtatccctggatgatattcatgacgctgttgaatttaatattcaactggataacaaccggcgttattgcctagagaggactcaataaaatgtcacttgaaaaatattttagagaggaactggattaccttagacaattggggcgacaagccgcaattgaacatcctcacctcgcctcatttttgtctgaacaaggctctgacccggatgttgagcgtttactagaaggatttgcttttctcgcaggtaatttacgggcaaaaattgatgatcaattccctgagctgactcatggattgttacacatgctatggccaaattacctgcggccaacgcctagcatgaccattatccaatatacacctgatgatagtgccatcacaaaagcgacgcagatcccgcgtggaactcaaatcaaaagccgtccgctgacggatgatagcgaaaatgatgaggatgaagataattacttaagcaataccaatactcaaaaaacaggccaagacgatcatcgctgtactttcactttatgccgtgatgtttggctgtttccgatgtctatccgggacatttcggtcaataatagtaatgagcagggtgtcatcggtctgaatttcacctcaaaaacagaacttaacttacaagaactgcaacttgataaactgcgtttttatctaagcggcgatgattacagcagtacacaactctatttctggcttagttattaccttgaagatgcaaaacttgttgtaggcgataccacgatttcattaccggattttgacttcgttccagtgggttttaatcgggaggacgccctattgccttacccgaaaaatgcctatatgggttatcgcgtcttacaagagtacttctgtttttccgaaggttttctgtttttcgatgtcactggcatccctaaattaccggcaagtcttaaagccacagatttcacgctaaatctctatttctcagaagctctgccgccagaaatcaaaatccgtcaggatacttttcggttgcattgtgttccggcaatcaatctctttccaatggatggtgaagttattcgattggatggtagccgggacgaatatccattgagagcgagttatagccatcctaatcgctacgatattttctctattgataaagtagaaagctggctagtcgggcctgatggtaaacctaaactaagccgcgatggtagacgatcttatgtgccattcgaaagttttcaccatcaaatcgaacatgaaagcgaactcaatactcgctattttcgtatcagaatcaaggaatccccatttcgcaaagggcttgagcattacatctcttttgtccgtggtgatgaatctcaacttctattaagtgaggaaaatgtctctattcaactgacgtgcaccaatcgcgaactgccacttcaactccgggtaggtgatattgattaccctttatcgggaagctcgtcatttgcgacattccgcaacataacccgcccatccgttccactctatccattgatgagcggtgagtatcactggtcgcttatttccaatatgtcactgaactatatgacattattggacaaagacgcactaaaggcggtactaagaacttacgatctccccagccgatataaccgacaatcctcacgctcatcacaaaaacggctagatgccattgaacggattgaaacgaggcaaatagaccgactatttaaaggtctcccggtacgtggttcggaatcaacattgtatatccggcaacaggctttctgttctgaaggcgagctttatctgttctgcaacatactgtcacgcttttttgccttatatgccagcgttaactccttccacatgttgaaggtgatcaatttagataatcaggaatgttatcaatggccggaacagacaggtcaacatgcgttgatgtaacgagtgaaaactcgccacaaaatcagatattagatgtgtcaaggtataactttcatcaattggtcgaattgttcaaccaattggcggtagcgtgggaaaaaactgggcaaaccaaccgtccggaccgtgaagcaattcagtttaaatccagcgccagcctggctttcccaaccagagatattgtctctgcgaaacgttctaaagagggacgtttccaggtggaagtctcttttctggggctacatggcagccaatcgcctatgccaggttattaccttgattcgttggcatgggaagacgcccaggatgaaaatcgactgactaacttccttaatatcttcaatcacagctctattgtcatgctccatcagatctggcggaaataccgttattacatctgttttgacaaaaacggacaagacgatttttctcagcgtatgtttgctttggtgggacttggcagtaatgtgaaccgttctcatttaaatatcaaccatagcaaaatgctggcctatgccggcttattagccagccccggtcgatcaccggaagtgatatgcagcttggtttcacactgttttgatctaccggatgttacggtacacggctggcaaatcagaaaaatcgctatcgagccatcacagcaaaaccgtttaggtggaatgctgaaaataaggggacagaaacaaaaagttaaacagtctgtaataggaaaaaactttttcctcggttcatgggtgagaagctgcaatagtaaatttattttatgtatcaataatctctctcgtgaacacttcttgtcatttctcccagacggcaagaatttcctgccattggtaatgtttctctgttttgtcctgcgtgatcagatggcttgggatctgcgtcttggcttggccgaaaaccaagcgggcggcatggtacttggcacgaaattaaacaataacctagggtggaccagctttcttggcgaaccggaaaagaaaccctttatcacgatttcagtgaatggataaagacgatggaaaaacaacagccaactctctcattacgagtgatcaacagcgatcaattggaaagcggcaaagcggctagctgcctattctcgactcaaggtggcacagtcggcagcagtgaaagccatctttggtccgttcaagatcaacaaggtaatatcaatccatcacaatttactatccagtggcgtgatgacgcattttgcttacaaatgattgcgggtcccctgtttgtgaatcagtcacccttgacttctggcgccggtttcatccgcctgcaacaagcggatgaaattaccattggtaaactggtgatcaaaagctatatcagtttttccgacacagatcgtattgatccaatgacagtatcaccggaatcactggtctccagctatagcaatccactggacgctatgatggaaaaagatcctgctcaagattccgctttcactgatcatggttctttggcccccacgatcaaacacgatttcagccatgatccactcaaggttctcgatagcgaaaatctgaccactctggaccagacgtcagtgagtaacgaggtagaccaaagcctgcaacaagaccactaccgcaccccattatttttctcttccctctcagataacagaggcaatgctatggatcaggattttgttgatttacccggtatctcttcgccttttaatgaacagtatcaggacatggaacagcaacatgttgctatcacgccattgatgcgagggttgaacacacaattgcctttgcataacagccaacaagctaacgactttctggaagaaatgggtaaaaccatgaaagcggccattgaaggtctactggtactgcaacgtacacagcatgggctgcgtgataaacaattgcgccctattgaagataatccgttacggctgaacatggattacaacaccaccatgcaagtgatgtttgcggatcaaaaaagcccggtacatctctctgccccctccgctgtcgctgaaagcttacataacctgcaattgcattatcaggctaaccggattgcgatcactgccgcattgaacaccatgctggatgctttctcaccggaacacctactgaatcgttttgcccaataccgccgcagcaatgaaacacaggaaaaagatgcaacctgggcatgggaaatgtacaccagttactaccgcgaactggcttccagccgccaacaagggttcgaaaaactgttcggtgaagtctatgagcaagcttatgaccgtgctctacgtcaaggtttagaggatagccagtaatgaagcgctccggcggtaatacctcatggttcggtagtaataccgtatggtttgtattgctggcagcgctgatgttaagcggttgtagcagtgcatggcaggcaacgaagaaagtcggacaggtagtctgggacccatcaactccagttggtcaacctgcgaacttaccttccaccgtcgcgatcactttgctggcagaacctgatattaaccccaataaaaatggagaagccactccggttgaaatgcatctgctctatctcagtgaagattcccgtctacttgccgctgattatgaccaactggcgagtgacaagctggataaagcactggggaaaaattatatcgaccatcaggattacaccttattgccggggcagtacaaaccactgccagtcatcccgctggaaaaaaatagccgttacatcggcgttatcgttcgctatgccgatattaatcaatccgaatggaaaaaggtcatccgtgtgaaagacacaggacagcaataccacattctggtgcatatcagagcgaacgaagttgaacttagaaaagaggagcaataactatgccaggcaagaatcgggtgatttggcgcgaaggattattcatcaagccacaacactttcaacaacaacaaaaacataatgactatctggctcatagccgccagacgtccttaactagttatagttatggcttcagttctctgacactggataaagaccttctcgctctaggacgcatcagtatcatcgaagccagcggtatcatgccagacggcacagtgttctcgattcctaatcaggatgcaactcctcaaccgcttgatgttgtgaatattcacgagaacaacagtaaagatatctatctggcgctaccaatagctaacgatattctgaatgaaatctctcattcagaatccaatcatgcaggagctgtgcgctaccgtgaatacatggaagatatccgtgatttgcatacagatggcggtgatatctgtcaagtcatgctggcacaactgacgccggttctaaaacagggttcagaagatctcagtgctttttccgtactcccgctatgccagataatagaaaagcgccctaccggaactatcatactggatgaagatttcgtaccaacctgtacatccatcagggtctctactcaattaaaaaattatatggatgaaatagatagagcgatgacagaacgaggcagatcactcgctaaccggattggttctcccggacagcaaggagtcgctgatgttgctgaatttatgatgctccagctagttaaccgagttcagccgtggtttacccactacgcaggacaagccattttgcatccacaagattttttcactcagctgatccaaacctgtggtgaactgagaacattcactcatgaatcccgtcaggtcggcaatatgccaatttacaaacacgacgatctgacggaaacattcaaggaagtcatgatcctcatgcgcgaagcaatgggcgttgttctgaccccgcgagcgattccaattaagctacaaactcaagccaatggtatccgggtggcccacatccatgatcgcaatgttttgacgaacgcggaattcattctggcaatccgcgcacaagttccacatgatcaattactccgcaagtttgctcaacagactaaagttacatcggctgaaaggatccgcgaaatggtcagcatccagttgcctgccgtagcactggcggcgcttccctctgccccacgtcagttgccttatcatgctggttacacctatttccgacttgagcaacaaggcgacgcatggaaagacattctaaaaggtaactccatcgctttccacgtttcaggagaattccctggattagatatgcaattctgggcggttaggaatgggagtgcctaatgaaaactgaaaccataaatggcaatcctattccgacgcaggaggtcactgataatgccgtgcatcttcagtatcagttaccgctgcgcggagaaagcctaaacccgatgatcgatgccgctacaccgctgctcggcatggtcatgcgtctaaaagacatgggcgaacaaccgctgccggaccagctttatcaacaggtcgtcactgatattcaggcaatcgaacaacttctacaaaccaaaggctatgagccgggcgcaattatctcttttcgctatacgctctgtaccttcattgatgaaaccgcattgggtcatggttggaacagcaagaatgagtggttacaacaatcactactggttcgattccataatgaaacctggggtggcgaaaaagtttttcagttgctagatcgtttgatgggtgaacctcagcgctatcaacatctgctggagtttatctatctttgcttctgcctcggttaccgtggccgttataaagttgcttcgcagaaaagtgatgactttgaacgtttattccgtcgattacaccaacaactgcacgcgctgcggggagaagctccttccatcattctccacaataacgccaatgagcgtaatgatcgctatcgcctgggtaagcgtctgactattaaacatctgttctggagcggtattacgctgctcgctatcgtttatagcttctacgctatccgtctgcacaaccaaacccagaacatcttacaacagctaaataacttactgagctaggaaagaaccgatgattcagattgatctacctacactagttaatcgcttaaatccgatgactcggcacgctctggaagcggcggcagcgcaatgtgtcagccaacagcaacctgagatcacggtttcacagctattgttgcaaatgatcaacacccctctcagtgatgtcagagcgatcttcaatcaagccgaagtagacagcgatttgctgaaagaacaacttgatcagatgatccctcaccatcaagcaatggttcaggcttatcctaacttttctccaatgttagtggagtggttacaggatagctggctgttagcatcgactgagatgcaacatcaggaattacgcagcggcgtcatgctgatgaccttgctgttcagcccgctacgttacctgacaccccaatccgcacgtcttttatcgggcataaaccgcgaattgttacgccagaattttacccaatggaccgcgggctctgctgaacaaccggttgtggaaaacgataaaaacggacaaaacaaagctgccgccgggagtgatagcttgctcgcccgttttactcaaaatatgacagaacaagctcgtcagggaaaactcgatcctgttctatgccgtgacaaagaaattgacctaatgatcgatattctctgccgtcgccgtaaaaataacccgattgtggtaggtgaagcgggcgtcggtaaaagtgcgctcattgaagggttggctctgcgcattatcgacaaccgagtgccggaaaaactgcataacagtgaattgatgacactggatctgggggcactacaagcaggtgcggcggtaaaaggtgaatttgaaaaacgtttcaaaggcattatgaatgaaataaatcagtcatccgtaccgattattctgttcatcgatgaagctcataccctgattggcgccggtaatcaacaaggcggactggatatctccaacctgctaaaacccgctctggcacggggtgaattgaaaacaattgctgcaaccacttggggagaatacaaaaaatatttcgaaaaagatgcggccctctcccgccgttttcaactcattaaagtggccgaaccgaccgcggaagaagccatcattattatgcgtggcctgcgggcaatctatgaacaatctcatggcgtattaatcgatgatgaagcgctaaaagcctctgcggtattaagcgaccgttacctctctggacgccagttgccagacaaagccattgatgtgctggataccgcctgcgcccgcgtggccatcaacttgacgtcacctccgcgccaaatttctgccctgaaaaaccaactgcatcagcaacaaatggaatcagacgtgctggcgagggaacagcgcatggggctcaatcagcatactgatcgactggatgaactacgacaacaacagcaggaaaccacagagaaattggctgcactagaagccagttggcagcaacaacagcaattagttcagcaaattattgaactacgccgtcagctattaaccgacgaaacagaattcactaacgaaacaaaacagagcgaaacatcggccgaaatgacaactgaagagttgattgcacaattggctgaactgaatgaacagttggaacaattacagcaacaacaaacgctcatttctcctcacgtggataaaaaccagattgcaacggttatcgctgaatggactggcgtgccacttaatcgtctgtcacaaagtgaactttccgtggtgacagaactgcccatgcacctgggacaaagcatcaaggggcaggatctggctattcaatgcctgcatcagcacttgttgaccgccagagctgacctgcgccgtcccggtcgtccattgggcgccttcttgctggtaggacccagtggcgtcggtaaaaccgaaaccgttttacagattgccgaattgatgtttggcggacgtcaatatctgaccacgatcaatatgtcggaatttcaggaaaaacacacggtttcccgcctgatcggctcacctccaggctatgttggctatggggaagggggggtactcaccgaagctattcgccagaaaccttattccgtcgtcctgcttgatgaagtggaaaaagcgcatcctgatgtcctgaacctgttctatcaggccttcgataaaggtgagttggccgatggggaaggccgggtgattgactgtaaaaatgtggtcttctttttaacgtccaatttgggctatcaaactatcgtcgataatgccgataaaccggcagagatgcatgaccggctttatcctgaactggccgctttcttcaaacccgccttactggcgcgaatggaagtggtgccttatctgccgttaggacacgacaccctgaaaaccattattcagggcaaactggcgcgcctcgataacttattgcgtcaacgcttcaatgccgacgtcaccctgagtgatgaggtggttgaagagatactgcaacgggcaactcgtactgaaaatggcgcccgcatgctggaatcgatcattgatggcgctttgttgccaccgttatctctgctgttattgcaaaaaatggcggccggaaaacagatccgcactatccagctcaccgttaacgaccatcagttcaacgcggtggttgaggagataccatgaaacaacggctgaaaagcgcattagcattactggaaaatgactctatcgagcaactggttcatcactttcttgaggtgaatcaccaacgccagcgttttgatgccttgctggtctctctgcttaacgtgaatgaaaaccgtctggaatgctaccggttgccggcgccaaaccagataagcgcgctgcaactggatgtcaatatcggtgatatcaaccatccactggtccaaatcttgtacaaaggcacccccacgacgtggggatccctcaatcaaggggtacgtatcgaccatcgaaactttcgcctcttcgtagaagaactccctcatcgctgcggcctgcatgctattccgttgtttaactgcaacgggcaagcgtgtggcgtgattgctgttttcgccaaagatgtccatcgttttgctgacgatagcaacatgttttacatctactgccatgtcatgcaacaccgattgaaaaaattgcaggaactggaacaactgcgtgaccaattacgccagatccgccaggtttttcagacacagcgccagaaagaaaaacagcttgatgaattgctggcttcgttaagcaccacagccgaaaacaaaacctcagccagcgtctctcacgattacagcaaaatcgacaatttacctcaggcacttgaagagttcgaatgtgcagtactgatacaacgccagcatatttacggcaacaacaccaaacagattgccgccagcctgggtattgcaccccggacactgacttacaaactggcgaaatacaggtgtaaattatgaattttctgctactggtcagttcattaatcgcctctctgacaggcacccctgatactcagccagatcaggaaaccccaacagcgccttcactacccgctttgctgcaatgccgggcagaaccgtcaccgttggtcagagtcgattgctacgaccgtctattggataaagtcgataatattgccgttatcccgttagaaaaaaccggcccggtctggagacaggcaatggaacaggagatgaaacgcactgaccattcaaccggttttatcaccacccaatctgacagcctaccgactcgcgtcatactgaccacccccgcaatcggtgttccaccaccccggccagtcctgatgctgagttgtatcgataacattacccgaatacaaattgccctggctaaaccacaagatagcggcacggtgatgatgtcgacggaaatcacccaattcagtgctgactggttcttgcgggaaaacggctacctgctggaatccagccgtggactgccgggcattgaagaactcaaacgactgatgacaggaaaaaccctgaccatcaaaaccggcaacggaaaccgcatgacattcaacatttctcaactggaacaggcggtgaaacctttacgctccgcctgtcgctggtgatccccatggatatcaggaaacaatttgactggcagggcctcctgctgacccccctgtcggatgaactcatcagccgggcgctggatgaaaacgaacccgcctgggaatatatcgacggggagatggttaagctgggatcactggcccattccagcctgaatattgaagagatccagcgtcaggcgctgcaactgttcagcgaaaaaagcaaagatttcagactgatggttcatttgctgcggacactgcaacacggcagtcatcccgctgaactcatcctggcaatggagctgttagccgattacatcccgcattactggcaggcagcctggccacacaaaccgcagctcaaacgccgcctggcgcaacaggtgattaaacggtttgacgctgcgcaacccggcttctgcgaacaggcggatgagacgcagcgcgaagaggcgcagggcgcactggcacatctggcacaatgctggcataccgatgaaccggctctggctaaagagatcgaccagttacgcccccgctatgcccgtaaacctcagcccaaaccggcagccgcgccggctgaaccggccgaaacgacagcaccatcggcaaacacttcagcactgacatccccccccataccggatgtcaccgtagacagtgccggtgaaaaagcctggaaacagacgctcctgaccgtggctgacctgctgtgcgaacgccagcctgattcccctgtcggttaccgtctgcgtcgttatgctatctggtacaccctgaccacagcaccgatggcgaatggcaccggcaaaacaccgctggcaccgacgtcggcagaccgcaccgccgattatctggcgaaactcccggcggcggataacgccctgctgcaacagatagaacagagtctgaccctggccccttactggctggacggacacgctctcgcggcgcaggccgccggcaaactgggttaccacgccgtggctgacgctatccgcgatgaactccgggcctttcttgaccgtctgccggtcctgcaaaacctgtctttctccgatatgagcccgtttatctccgacgccacgctgaactggctgcatcccccggcgaccgccaccgtcagcagcggctccacgccggaacaggacgccatctggcactgttttcagcaacacggactggaagccgccctccacgccgcggagcaatatcagcaacagctgaccgaaccgcgggatcaattctacggtcagttactgacggcccagttactggagcaggcgggcatgcacgcgctggcacaacaacattaccgccagctgcgccaggcaggacaacacctgtcactcgccgactgggaacccggcctgctggcggccctggcagaaaaagccccgatgaccgcccccgccaaggcgacgaccgcaaacaggagcgttaacccatgaactggctttctctgctgctcaacaatatcaaaaaaccggcgaggccgcgtctgccgcccctgaaagccaccgcctcgctgatactggccctcctgccctgtctggccctcatctggctctggtggtggggccccggctggcagtttaagcagacgcatccgctggacaccctgtctgcccgctggctggcgacggtgatcatcctcctgctggccctgagttttatcgggataaaaatctggcgccgcctgcgccagcttgaaaaacttaagctggagggggaactgaacaccgtcgatccggtgcgcgccgatatcacccgtcaggaccgttatctccatcactggaaagcgcaactgcaacgccatctggggacccgggattatctctaccagcgcccctggtacctggtgatgggtaacaccggcagcggcaaaaccgccctgattcaggccggctgccggctgactgacattgccgccccggacaccctgagcggggaagaggcgctgcccctgcatctgcgctgctggctgggggagaaagccgtcatcattgacccggacgggttccttatcgaccagatatcgccgccggacaccggcaaaccccagctgcccgcccgcctgtggcaggcgctgctcgtctggctcaccgaaaaccgtcagcgccagccgctcaacggcatcatcctgacggtggacattcaccgcttactgaccgacaacaaagcgcagcgggaacgggttattgccgcgcttcacctgcgcctgcaggatctgcgattaactctgcatcatcctctgcctttctatctggtgctgaccaaactcgaccggctgcacggtttcagcgccgctttccagtcgctggacagcgcgcagcgcgcccagatcctgggcgtcacctttagcctgaatgcgcgggatgagcagagctggcgcactgagctggcccagttctggcaccagtggatgcagcagctcaacgcggccatgccggacatgatgctcaacaaagtcgatatcagtcagcgcagtccgctgttcagcttcacccgccagatacaggggctgcacagctatctggtgccgctgctggaggggctcctcgacaacagcggcccggcacagccgggcctgcggggggtttatctcacctcgtctcaacaaatcggccagatggatgacctgtttacccagtctgccgccgtgcagtatcatctggggccgcaggcttttcccacctggccggtggcggacaccgtgccctacttcacccacgcgctgtttgaagcggtcctgctggccgaaccgaatctggcggctgaaaaccgccggtggttaagccgccaccgccacacactgctgaccttctccgccgtgggtgccgccgtggtgctggccctgtggagcggctggcactattactatcagcagaactaccgggccggtgacgaggtcctggcgcaggccaacatcttcctgtcggtgccgccgcccaccggcgaagaccgtctcggcaatttacagcttcccctgctcaatccgctgcgtgaggccacgctggcctacggggattaccatcagaaagggctgctggcggatatggggctctatcagggcgcagcggtcggcccgtatgtggaaaacacctacctgcaactgctgtctcagcgcttcctgccggccttaatgaacggcctgctggatgacctgaaccgggcaccgaaaggcagcgaagaaaaactggccgtcctgcgtatcatgcggatgctggaagatggcagcggccgccataaatcactggtcgaacactatctgcaggcgcgctggagtcaggcgtttaacggccagcgcccgttgcaggcgcagttactgacgcatctggactatgcgctggatcacaccgactggcgggccgcacgggaggcgggcgatcaggccgctatcagccgctttgcaccttaccaactgccgctcatcaatgccgagaaagaactgagtcagctctcgatttatcagcgggtctaccagaacctgcgcattaaagcccaggattcactgccgccgcccctcaacctgcgcgaccagattggcccgggctttgaccgcctctttatggccaataatgacaagcaactgattatcccgcagttcctgacgataaacggcctgaacaactacttcgtcaaacaggacgaccagctgatcgacctcaccgtcatggacagctgggtgctgaacctgtcacacaacgtgcagtacagcgacacggaccggcaggaaatccagcgacaaatcactgagcagtacctgggagactacacggccacctggcgcgcggccatgaacaacctggatattcgtgatttcaccgatatcccgcaggccctcagcgcccttgaacaggtcatcagcggcgaacagcccatcagccgggccctgcaaatcctgagcgacaacacccgtctgccggagattaacgagacgctgccggccaaagcccggcagccgttacgtgataccccggattaccgcctgcgggtgcgtattcaccgggaattcgcgccggaaaccgcggtgctggaggagtccggggacaaaaacagcaccctgcagggggtttatcagcaactggcggccctgcaccgttacctgctgggcattcagaacgcgccggtcccggggaaagccgccctgaatgccgttcagcagcggcttgaacagcataacgacgacccgattttcgacgtacagcagcgggcgaaaaccctgccggcaccgctcaaccgctgggtcggcgcactggcggaacaggcctggcgggtggtgatgcgggaagccatccgttcgctggaaatcgaatggcacgacaccgtcgtcagacagtaccagacctacctggccggccgctatccgtttaacccggacgcgacggaggaggtgccgctcagtgagttcgggcggttcttccggcccggcggcacgctggatgccttctatcagcagaacctgaaaccgtttgtggaaaacaacctgacccaccgcgcggacggccagcaacttatccgcccggatgtgctggaacagctgaaacgggccgaccgtatccgcgacaccttcttctcgccgcaaaacggtctgggggtccagtatgccattgagcccctcagcctgaccggcaataaacgccgcagcctgctcaatctcgacggccagctgctcgattacgcccacggccgcagcagcattgtgcacctcatctggcccaacgcgatgcgggccggggtggaaagccagctcacgctgataccggatgccggcggcaaatccccgcgcgccatccgcttcaccggcccgtgggcccagctgcgcctgattaacagcggcaaactgactaacgtacgtcaggattcgtttgatgtgcggttcacggtggacgggggcgacatgacctaccgtctctacgtggatgaatccgacaacccgtttgccggcggcctgttcagtcagttcagactgcctgacaccctgtattaagggcaaactgtattaagggcaaattttatgccttgcaacatagccacccactctgtccgccgcgccggcggcagaggaaaggatgaacagccatgcgtgaacgccctgaaaacctgattatccgtgccggcggcaacccgatgacgctgccggcgttcaccgccatacgcgaagaaattaacaaaatcaatcacccgtctcagccggcggtgaactggccgcttatcgaatccctggccctgacgctgtttcgctcccacggcgtcgatttgcagagcgcgatttactacaccctggcccggatgcagctcagcggcctggcggggtttaccgaaggctgtgaactgctggccggggtgatggtcagccagtgggatgacctgtggccgccgcagccggcggtccgcaccgacctgctggactggtttaacacccgctgcggccacgccttacgccagcacgattacaccgcccgcgacctgcggatgatttaccgggccgagcgggccttacagctgatagtcgaccggctccagcagtccgacctgaaacgcctgccgaaggtcgaaaacctgctgtggttcttccagaacaccgccaaaaaactggaacagacccgcatcctgcccaagcccgccgccaaacccgtgcagatgccgccgctggtttatctcgccagtactgaaccggcgccgtctgaaccggacaccggcgacgacgcgggatatgccccctctcagccaaaagtccaggtccgtttccctgaaccgccctgtctcttgatcagatctccaaatcaactgatttagccagcaaatagccgtctatcagggtttgcagccgaaaccagccttcccaaagtcgttcccatccgactcgacccgtgcgtttggaatcgtaccagccggccagttttcccagattgatgaaggcccaatgcaaactcggggcttttttcggcacacggcgtttttcttgttttgaccacagtaatttccacgccagggggcttaatactgtctcacagctctctttctctgcctcttctttgttcagacccataaaacgcagctggtgtattcgtaccgcaataaaggccagcagcactatcatgcgctccagattatctttgctttgcatacgcagcgcttctacctgcgtgccgcccgttttccacgctttgtgaaattcttctatcagccagcggcgctcgtaataactgaatattttatgggcgtcttcctgactgttgacgggttcggaggtcagaagatgccagcaaagcccatcctccggacctttttcgtagcaaccgacataaaatatccgcaccgcctcaccgctttttccttcggggattttcaacgtcacttcggcataactgatatcacaatgcgcgacacgcgcctgacgcccgcctttctgtctgacctgaactaatcgttctccagcactctgtaaccggctaataaagtcataaagtttatcctgactttcctctatacgccggttttgcatcgaacggatgacgaaacgttgtttttggctcgttttataacgcagatattcgatgatatcggcttcacggtcacagacagaaatcacgttggccatctgctcccctaaccggctgtcgacggcttgtgaggcccgttcccacttataactctctttcccttcataagggcgtgtatcgcgttgtcggcttttgccataatcactgacatctcgacaccagcgctgttgctctatcaaccccacgacctgttgttcttcaggcgcaaataacaacaccgagtgtgcctgcatgccccgggatttttcctttgaggtggtatagccgagttcatcggcgaccgacgcatgggaaaatgacagggttgtcgtgtcttccagcgctaacaggcaatgataacgttgagcgtgagcgacggtggcggtaaatccggcttcggcgatggcctgaggcgcaatggcggaatttcgggtcagtcggtaggccgcttcaacatcggcaggagagtcaagagattgcacgagcgattgtcctatatggttagccaacgaacaggccactttcaccaggcggttggtacggcgtttatcacctaattccgcatgttgaaacgtgtcatttgcccattgttcggcgctggttgaaaacataaagattacctcaagtcgtgttttttattgagatcaatctatgagggaaaagttcaataacgcgggggcgggttaaaatatttgtgtaggaaagacaggaaccgcccccgcggccgatgagtgccttacaggggttcggcctgggcctgttactgggtgcattcgtcctgaccgggacctggctgggattttaccggccgctgcaacagcaattcactgccctgactgacaccccggacggggccagactggcctggctgtcccacccagacctgacaacctatgcccggcagttaacccggttagcggacacctccccgctggtggtgctgcaacaggctgagcagctgaccgacagggcacaaaaaacctggccgcaggaccgccggcagcagcgggaaacgcagcgctggcagcagttacagtccatccggcgggaaaacgcgccggtctccggcagctggcagcagacccggcatcagctccagttactggcggacaatatcctgacccaggagcgcaaccggggcagtttcaccctctcttacctgaaaacggcgatttaccaaatccagcacagccacaaccgtgacgtcccgctggaagagctgctgcgccagctttccgtcgccgtcgaacagggtgagagcgtctcgccggcgctgataaaaaagaccgacgaccggtttaacgccctgctcagccagtattacgcgttgcagcaggccgccggcctgaccgcgctccctgagaaaaaccgcccgtaaattcagagaaggaacccttatatgtcatttcagaaaaaaaccgccaacgccggcaacctcgcacaacaaatcgctgaccggctgagtccgcaaagcgccggcgggttacagtttaccctcaccgccggcggcctgccgccgcacacctttgtggtggccggctttaccctgcacgaagccctctccaccccgttcacgctgaccgtcagtttagccagcgccgacccggcgattgatttcgccgccgtcctcgaccagagcgccaccctgaccatcctgcgcgccggcaaagtcgagcgcaccgtcaccggcatggtcgccagctttgtccagggcaataccggcaaacatcagacccgctatgacatgaccatccggcccgatatgtggcgcaccaccctgcgccagaatgcccggatttttcagcagcaggatatcaaaaccatcctcaccaccctgcttaaagagaacggcgtccgggatgtggcgttcagcctgcgcaatccgcacccggaacgggagttctgcgtccagtaccgcgaaaccgattttgactttctgcaacgcctcaccgccgaagaagggattttttacttctttgaattcaccggcaataaaaacaccctggtgtttgccgacgatgcgggctctgtcgtcaaaggcccggtgctgccctatcaccccgacgacgctgaacaggcccggcaactgtgcattacccggctgacccgccaggcgcaggtacggccggcggtggtcgagctcaaagattacaccttcaaaaacccggcctgggcggcggagttccgtcatcagatgcgggaacaggacctccagcataccggctatgaacatttcgattttcccggccgcttcaaagacgaacagcacggcgctgatttcacccgctaccggctggaagcgctgcgcaacaatgccctgaccggcgacggtgacagtaatgccgcgacgatgcagcccggcgtgctgttcaccctgaccggccatccccggcctgacctcaaccggtgctggcagctggtcggcgtcacccatcatggcagtcagccgcaggcgctggaacaggccgccggggagagcggcaccgtgatgcgcaacgactttaccttcattgctgataatcagcactggcgcccggccccgttacccaaaccggcgatggagggcccgcagattgccaaagtggtcggcccggccggcgaagaaatctactgcgacgcctacggccgcatccgcctgcaattcctctgggaccgctacggccggagcaacgacagcagctcctgctggatacgggtgacccagccctgggccggtcagggctggggcatgctggcaataccgcggattgggcaggaagtggtggtggactttcttaacggcgacccggaccagccgattgtcaccgggcgcacctaccatgccagcaatctcccgccaggagccctgcccggcagcaaaacccagatgaccttccgctccaaaacccataaaggggacggctacaacgaactgcgcttcgaggatgccaaaggcagtgaagcgctggctttacacgcccagcgggacatgaacaccgtggtactcaataaccgcgaaacccgggtcatgaacgaccacaccgaaagcatcggccataatcagatgctttcggtcagaaacgaccgccacaaagaggtgacaggcaatgaagtcagcgctatcaccggcctgcgtcaaatcacggtcgaaaaagacagcctgctgaacgtcaaaaataacatccagatacaggcccgggcggggggtatcgaaattgccacggccggcggcagcatcaccatcgacaatgccggcaatatcagcattcagggggccaatatcaccatcaatggcaaacaggtcaatgtgaactgaccgctatcgactatcagcttattattttaatcaacaacggaaaaagcatggaaaacacaacctatcagatgaatgaaggctcactggctatcccgggcaactggcgggatgaatccatgaatgtatttgtgctgccggacgacagcggcatcaatctggtggtcagccgcaccccggtccccgccggcatggataaccccgcttactatgaacagaccctggagcagttctgcacccatctgcccgggtaccaggagcatcagcgcagcgaaatcaccctcagccagcaacccgcccgccgtctggattaccagtggacaagcccggaaggcgacatgtaccagaccgtgatactgcaaatccggggcccgctgctgctgaccttcaacctgacctcccccgcgccttttgaagccggccagcgtgataccctgctggcaattgtccacagttttcaggcagcctgatgacctgacaggaggaacaccatgtcacttggtgatgaaatcgtcacccggatagcgcgggttggcgcccggcacgcggtgcacgtctccccgccacagggctcccccggtccggccgccgcccgtgagggcgacccgattaaacatgccagcttcctgggggcgctggcgggtgccattaccggcgcactgataggggcggcggtctttgccgcggcatcggcactggtgggactgaccattctcaccgggggattagccaccgtcgcggtcattgcgctgggaaccgccgccacatttgccctgggcgatgtcatcagcgccgccagttcggccgtcacgaacatggtggacagcatcggcccgccgagcggcaccctgacgagtggctcccccaatgtctttatcgaaggccaaccggcggccagagccaccaccgatatcgccgtttgcagtaaacacccggcgccgcccctgattgcccagggcagtgaaaccgtgttgattaacggctcgccggcggcccgggtggatgacaaactggcgtgtggcgccaccataaaatccggggccaaaacggtgtttatcggctccggtcagggaacttacctggcagtcgccgacgagttttccgcctgggaacgggcgatactgatagcggttgaatttctggtgccgccgtcacgaggcgcccttaaggggctgggtaagctgtttaccaaacccggtcagggaattcagggggtattgaaaggcgcgaaggcgggtgctaaaaaggctaaggcgctcctctcaaatcgaatttcctgtgccaaaaaagctttcagagaaactgaaggggcaaaacgttaccgggaagcgacgaaaaaattctttaccggcgacccgattgacgtcaccaccggccagttgtttgaccagcggaccgacatcaccctcggccagaccctgccgctggtgtttctgcgcagctgggtgccggaggaacagggcttactggggccgggctggacggacagcttctccgaatgcgcccttgccaccggcgaccgggtagaaatccgcaccaccgaaggggcttctctctattttgccttaccggccgcttatacccacagtgttaacccggaccacccggactttaccctgagccggggagaacagggatatattctccgtcaccgtgattcaccggtcagcaaatattttaccctgccccatccgtcatccgcctcaaaagaggcaccccggcgctggttgctgacggaacaccgggacgtgtatgacaaccggctgcggtttatctataacaagcactgtcaactgacacaggttctccacagtgacgggccggagttgacgctgctttataacctgcgcggacaactgacagagatacgccgcaccgatgaaaggttacaggaagtgatggcccgttatcactaccatgacaacggccggctggcggaagcggacagtactcagaacttccacctgtactatgaatataacgcgcagggcctgataagccgctggtccgatggcgaccagacctgggtggattaccgttatgataaacaggggcgctgtactgacagtgtgggagccggcggcttctatccggtccatctggattatgcccccggcataacccgctccaccaccccacaggggcacaccaccaccgggcattacaacgaccagcagttaatcactgaaatccacaccccgtgcggcggcgtgacccgttatgaatacgaccgctggggcaatctggtcagacagatattaccggaaggggaaaccctgacgctgacttatctggccgataccggccgggtcacttcgctgacggaggcgaccggcgcggtatggcaatacagctatgaggctgacagcctgcaactgaccggcatgaccgacccgctgcaacgcacctggctgccccagtatgatgaacagggccagccggccggatttattgcgccggacggccggaaaaccacgctgacccgcaatgctttcgggctggtgacatccgaaacagacccggacggcaacagccgcacacaggaatatgataagcatcagcggctggtgcgggtgctggatgaagagaaccggaccgtcagtctgggttatgacagccaggaccggctgcgcagcctgaccgcggcaggggcgctgtggcgctggcgttacgaccgtcatcaccgggtggcggtcagcgaccggccggacaaccagctggaacacttcacccatgaccgccacgggaacttaacctgctggaccgatgcccgcggtgtgaaatggcaggtcgagtatggcccgtttgacctgccggtcgcccggcgtgacggcgaggggcatcgctggcagtatcgttatgatgccgacacgctgcaactgacgcaggtgattaacccgcagggggaaacctacagctacaccctggatgccgacgggcgggttatcaccgagcaggattatgccggcacgcagtggcattatcgctatgaccggtcggggaactgcattgaaaagcgggacggggaagagaacgtgacccgctatgactatgatgctgcccgccggctgacgacgctgcacaccccggaaggccccacccgttatcattacgacagcgtgggccggctgttaaccgtggactccccggacagcaccctgcattttgaatatgacgggcaggaccggatagtgcgggaaattcagccgcacggagaaattcagcgtcactacccggataaccgcaccgcagaacggcagttgctgaccggcgaaacagcgccggtcaccggcccggcccggtttagcggtcagacccaccccggccgctggcagagccggcgggaagttaaccgggtgggagaactgattacgctgacgctggcagggcaggcacccctgaccatcgaacgggatgacgccggccgggatacgggacgttatgtggacgggggatttattctgcgccagcagtacagcctgatgggccagttaaccgcgcaacgggccggccgcaatccctattttttccggccggctgaaccggacgagattgagggacccgcttacgcgggcgtggcccgccggtatgaatacgataccgcgctgaatctgaccgccgccagtgatgacgggcagcaggtcaattatctcctcaacggcaacggccaggtgatttcggtgggggagggccggacactgcgcgagcattatcagtatgatgaaacggggtacccgtcaagacggtttgacggggtgcaggagattatgggggaaaccctctatcaggagggccatcgcctgaactgggtgggctcgcaccggtttgtttacgaccgggccggccgcatgcaggagaaacagtttttagcggaagggtgccggctggcgctgacgaaataccggtggaacagccagaatcagctgaccgggcttatcaccccggacgggataccgtgggaatatcgctatgacgccttcggacggcggacagaaaaacggtgtatccagagcggtaagctgaccacctatctgtgggatgggaatgtgccggcggaaatccgcgaatatcagcacggccggctgaaaatgatccgccatctggtgtttgacggctgggaactggtggcgcagcagacgcaggcgtttacgcttaatctggataaccgggtggagctgatggccggggaggtgcagacccagtatgcggtcagcgccccgaccggcgagccgctggcgctgttcgacccggcaggcaaacgggtgtggcgacgaccgaagcagtccctgtacgggctgcggctgggcggatacggcgaaaacccgcagctggacccgggcctgagatttgcggggcaactttttgatgaagaaagtggtttattttataaccgatttcgctattatttgccggaagcgacgtgctacctcagccctgatccaactggcctctggggtggtgagaatacctatcgctatgtgcaaaatcccacgaaatttattgaccctctagggcttgctggtgaaaatgtatttattcactatacaaataaagcgggttttgacggcattatgaagagcggtgttcttcatccaaacgtcagtggaaaagtttatataacggatgtactaatgtctccaaaagatgtaatgagagatttattgataaacaaccccaatcatataggacgaggagactatgcgattattttcaaaatagatccaggggaaagaggaaatatccgctcaccttctagattagaatatactcatgaaggaaagttgaaattgaataatattctgtatgccggtaaaaacccatatgccatattagaacatcttgattatgatacgagactcaaactcactgataatcaagttaaaatcagaaagtgcggaggaaaataatgaagcacgaatctattcaattagcaagggaagaggtgaatgcaataatcaagctgatcctttacataaagtttgaatgtgaagatcctggaacattgatatattcaagtagtcctttgataaattcagcattggaaaaaatgttgaatatgtatggttataaggatgattgggataaagttttttcaaaatttctagaagcagataagaattttgtaatcaaaagagtcgaatatttagaaaaacatgaaaatagtcctcttgatgagggaattaagcagcaaatcttatcaaatcatgcatatccatataagtggtagttaataattaacaaagccggaaagatccccgtgatctttcggctttgttatttttatgcttaaaataaatatcttacagggttggacttatatattaaatatatagcttaaaatcgcaaaaatataaaataaataataagataaacaaagggataatacagaaaaatataatattaacgataaatatatacataagatatatttttgctattttattctgttttttctctgaaacaacaaaaagccggaatcacttccggctggcttctttcttaccgtgggtgaatacccatgccacgccaacgccgtgtggttagtgcaatggcaaggcatcaaggtaatcatgatgtaataagaaatgctctggataaaataaatttaaatcaatcaactgataccatatcgaaaaagtgactcacatacaaaatatagctaaaaaaatatggataatggcaatattattaaatccaaagagatgtatacactgatattcaggggaaatacgtaaattaaacaggcagacaaagcgtctttgatctctggagtaaaactgtaggataattcaatatgggtgagacaataagttttcatatggaaccggttgaattttttaaaagttcgtattttttatccggttctattggagaatttaatgaatatgaaattattgataataaagatatggcattaaagcttcttttcgatcaagacataccatgtaactatatggtttggagtgattttttttctgatctggtatccgagttttatcttcatgaggattataaaaaagcagaaaaggatatccttgacagaataaaaatatctacccaggatcaagttaaagaaaacattagaaaaagaaaactatatcttacaagaaagaaacaagggttagttgataacatagaatacgataactttctaaatgaagtaaatgacgaatgtaattacatgttaaatatgataagcatttatcgatatttattttcttttaatcaagactctaaattagaagaaatattttctatatttaaaaaaggagttatgccgtgcggtataaaaaaagataaaaagacattagttattttcaatcctattcttttgaagaatagttaataaaattatagatgaactgccctcaaaagctagattcaacatttaatgactagatttagagaagcagttcacaatcactagatcttccgatgttcttattgatttaccgtggcgcataccctcggtaagccagagcagattgaagcttaccgagggcatccttaatctgatacgcctcctcgtcattcacggcacaggcgcgtatctccgcccagttcagccgcttgaccagttgggccaaagccagcgcttcaaggtgagttaactgaatgtcctgcaaatgttcaatggctattgtcatctcatgctctccccttaaccagcaaaaccacttatcagcgcccgctacattattacattcaacttctaggatgcctcatgctcaaatcagcgcagcacaaaagataaaaagagagatatatgaggaaagaggaatttcatacaagttatagggagatgattgatgctggcgtacctaaagctcaagcaagaaaagcccttggcgatgcttataaatattttgataagcttagaggcgctaataaaaacaatccattctttgatatctagatttattaagaggaaaatttcatgaagaaagaagatattttagagaaattaaattctattgaaaaagaattgaatattaaattacctaatttttatagaaagtttttatccgagaaaattcaaaatgaaccttatattgaaataaccggaaaagatcaagaaaatatatatgtttataattgtgaatatgttattaaaagaaataaaacatataacattcaagaggctaaaccaaattattttttaatcggtcaagatggtgatcttggttactttatatatgtagaaaaagataaggaaagtgatattatttatagcctagacttgggggctttaggtagcgtagaaatggataaggaagcggataaagaagcaaatgatatttatagtttaggaatataaatatctaaaagtcagccaagataatgagttagggctatcttggctgaataaataacgtttcataattctgctacacatgaccttcttcaacccattgttatacatagaattatgagtagtataagatgtagcgctatttgggaatcttatttatataaatcgaattttaatcgataaaaattctggcaggaaagcaggattaaaagctggcgataaaattagtgaaataatattcatttgaggatgatttcaatgaacgattcttttttttcacaacggatacagcaactttagctatatttgatttacaagcaataaaacacagaataacagatactcctgattggtggagtattccagacgatgaattaaaagaagtaaatgaaggcaatattgctttttttggcttaagagatgatggcgattatgtaattgaaattattgataatattgaacagccagatattagtttgaacataaagtcaccatcgggaaaaatattcattggtgccggggaagataccacaggaggagatttagaacctgatgattcagaatatatttcaggaaagaagatatctttagaaaaaggaaattatctgatcttattaaagaaaaatgaaaacaacatacagatatcatttataaaaagtcagtatttttcaaataaccttcaggagcctattagattaggttaattcaagtagggcagaagatcttacagatcttctgccctgattaatgatctaccgtggcgcatacccacagtatgccagtgccgactggagcttatcgatagtatatttataagagaatgaatccaatggtttaattccgtctcaaaaaaatccagtttattgtcaaggttatatttcttagaaaatgaaattttctttatccatgagcaggacaatatgattggaatgattcttaatgatgcttttcatccacatgaagaaaatatgattttaaaaaaataatcagatggatatgaaaaataaaatatggtctggtcaagtatctacaaccaaatgtgggagagtaaattaatgaattattatgtattaatgaacgattataattcttcactaatgccaagatatcttcatgctatagtagataccgagaatcaaattaatgaaaaatgggattatgaaggctccaggcatgatataccttattatctattagataaggaatgccctaatactttatatttgttatgtaataaaaatattgggaaattgtggtttaattattatcaacacaatatggctcatatcctatctgatagatttttcgatattatcaatgagtttaaattaagtgatcatgttttaaaaaaattaattgcgacatctattaaagatggaaaaactatcaataactcattaaattatcttttttttactgacaaagagttatttctaaatgaaaaatattcaatattggaaaaagataaatatggaaatttaattcctcataaattatcttttcataatgaatcattaaattatgatattttttcaatacggactactttattagcaggatttatttttatttcagaaaaagtagctaacagattaattaaagaaaatatcaaaagaataaagctaattaaattagatgaagtcttgaatcactattgtgtagattttaagtacgacattaaagctaatgtcaaaaaagggaaaataaaattaccctaagctaatagtaaaaagccggaaagatccccgtgatcttccggctttgttatttccatgcttaaaataaatatttttcacggttggacttatatattaaatatataatttaaaattaaaaaaatataaaataaataataatataaaaaacaataatacataaaaatataatattaatagtaaatatatacccaagaaacttcaagatgcagtttttagcacctgaaaatggtcgttaattctagacatcagcgagtccgctatatccggtagcgttgtggtgaaaaatttgaagacgttgtctcgaaattcatgtttatccgcaaaataacggttatttcgaacctgttcattcatgaccttccataatcgctctattgggtttaaatttgggctatagggaggaaggtaatgtaactcaatattgctaacataagcccactccttaacaagatgagctttgttgtaacccgccccatccacaataagatgaattttttgatgatagtcaggataagactttcttatttcattgaaaaaacagcaaatgttgtagtcattgatggtttgatattcctggaacaccgtacgaccaatggcattcaggttgagcgcgcccaatatattcaggcgagtccggcttcctgttgtttttactgtttttttctcgccttttcgcatccagccataaccgagtttggtgccttgagtcgggtgaacagcatcaagaaaaaggatgggttcgtctttcgctgtgactttaagattctcataatattcaataaattgtcgctgtttttctgcgtcgaatttatgagggacgccacaaggttttttataagaaaaaccctgacggtgtagccatttattcatgccgggaatgctaaaggtaatattccagagctgagcaacataggccacgatttcatgggtgtgatggaaaagatgttgagataagtgattgattaaaaaatcagtttgttcttgagaaagcaaactatcagaccccccattatcagatttaagtttaccttgattaaggtaatcgctgatatgacggttaacggtcatttcatgaagacgcagggcctgagcgatcatcactgaactccagccttcagaggccagcaggaccgctttgatgcgatcacactccctcttatcacggcaggtgtgatggagatgttcaagttcggctttttgttcatcggtaatgaatattttcatagcgaggataatgatctccatttcggataaaatcaagcatcttcaatgattacgggtatatacatatgctatattttagctattttattctgttttctctctgaaacagtaaaaagccggaatcgcttccggctggcttctttcttaccgtggagaatacccatgccacgccgacgggttagtgtaatagcaaggcatcaaggtaatcatcacggatatactgatgcaatactctggataaaataaatctacatcaatcaattaatactatatcgaaacaagtagctaacattcaaaatataactaaaaaagatatggagaatggcaatattattaaaaacaaagataggtataacactaatattcagggggaagacgtaaattaaaaagtcagacaaagcatctttgatctctggagtagaattttaggataatttaatctgggtgagataataaatttttatatggaacccgttgaattctttaaaagctcggattttttatccggttctattgaagaatttaatgaatatgaaattatggataataaagatagggcattaaagcttcttttcgatcaagacataccaagtaactatatggtttagagtgattttttctctaatttggcatccgagttttatcttcatgaggattataaaaaagcagaaaaggatatccttcacagaataaaaatatctacccaggatcaagtcaaagaaaatatgagaaaaagaaaatgatatcttataagaaagaaaaaaaggttagttgataacatagaatacgataactttctaaatgaagtaaatgacgaatgtaataacaggttaaatatgacaaacatttatcgatatttattttaatcaagacgctaaattagaagaaatattttctatatttaaaaaaggagttatgccgtgcggtataaaaaaagataaaaagacatgagttattttcaatcctattcttttgaagaatagttaataaaattatagatgaacggccctcaaaagctagattcaacatttaataactaaataagattctaaaatagtgctacatattataccactcataattccatatataacaataggttgaataaggccatgtgtagcaaaattatgaaacgctatttagatttagagaggcagttcacaatcaccaaatcttccgatgttcttattgatctaccgtggcgcatacccacagtaagtcagtgcggattgaagcttagagtttaccaaggaaatgatttatttgatctcaatcatattgatgacttcggaaggacgaatattcaacgaatgaagaaagggattacacctattggtaaggatggcttagaaataaaccttcatcatgtcattcaaaatgaacctggcccaatgactgaaattttaagtagtacccatagtaaatacaaccatatgcttcatatgtattcaaatcaatgggataaaacataggtcggtcctgatggcataagacgcacatataataatgcgccaccatcaacgaataggcacccatttaaccagtggaagaaaacatattggaaaacaagagcattggactttttaactccttaagaggaaggaagctatgaattatatagatttaattgaaaaggaaatgatatcaagcggggaagaaattctttctagtggcggggttgatatagatactatccgtgaattcgaatcattgcttggtgttacttttcctgaatcatataaatttttcttacaaaaatatggaacactttctttcggcggagatgattactatggaataactaaaaagggaataaatggaaatcaagccccatgtattctgtatgtaacaaagcaggccagagattccggtgatatagatgaagggatgattaaaataaaatcatcgggatatggtccttcctattctattgataccaatattaaaggaaaaacaggagaagctgtagtagttgagactgaattatccttcaaaagagacggagctaaaaacataattgcagatagttatgctgagtttctcttagaagaaataaaacaagctatagaagacttataaaagctactttatattaataatgataagccagagaaatctggcttgcccattttaaaattaaacgtctcatcccgcccaataaattcccaataaattcccaataaattcccacatccgcagcttgatctctctgagctggaagtcaaatttaaatgcattgaaaagataaccatatgaaaaattatgagaaaataatagaatctatttttagtgaattatttgatgacaacttaccccgttatcagaatagtttaacccgtccaatagataataatgatgatgtgtatgctaacgccagaaaagcattatcaaaattagatgatcaagacaaaacagctatttttgacttcttcaaggtagtaatacctgatacatcatcaactatatttggaaccattgatggttctcattttccccccaatatagatggtgattttacgttaatttatggagacgaagaaatacaaggaagtttacaagatttattcatagaaaaagctgagaataaaggtatttttaattaaaaaagtaaggctgaaagatcctctgcaatcttccagccttattatgatcgtaatgctccagtgaactcatacttcaattaattttcatttaaatctaagctctcagctttatcataaatacttaatacatctttccattttatcctgaactgatttctttttttcactttagacaatccttcctggtattttatattaacacctggatcatagtatattttacttgattcaagtgcatttataaatttattaagattagcacctgtagctaatacaatttggggaccaaacttatagtatgggaaatcaccatttttcacatcatacgagacaaaacatgttttagaatgtttccgtttccagtggtctaataattttccgaaattccagccagcagcaatattaccatttatactcctaagtactaatccgccatcaggatctataatttttttcttatcaaaatcatatccttcgagatataaagtcagcttcgttttttcgtttaacaatccgattttatgtatactggcaaaatcgactctatcctcttttttactggatgcataatcactcataaatttatgtaaattttctatgtattctcctttatttggctctggtgtcattaaagttacaacgcttcctgaatgtgcttttaattcccaaccagaaaaatcaggtccagatctgccatttggtataattccaaataaactttccagggtaaaacctgccccatttcttgctctatattcaattacattaccatttttatccagtctttgcgatttaataaaaccataagaataaatttccttcaaacgagttataagatcactacggctgtctttaatattagagtaatattcataaaaaacagagaaaacaggattcattaaatttttatctattaattctctgagctcaatggaaagagcgtcttcccaagaactcatataagcaaaaaccatgtctttacatataccaagaattaaataacgattcttatcacatctatttattctttcctctttcgttggcggttgcattaaatgagatggtgctattgaacaaccatttataattcccgacaggcgaatttctggatagttaggatacaaaataatttgagaaccatgtgcctgttctttacaactgtcagtatttatccaaaataaatttaatgtggccttaaatctcgcacctttttttgacataccagcgcttttcagttcatcaacaggaataccctgtatgacagaaaaatccgctcccaaatatatctgttgtttagaattgtcattgtttgcaagtggcttaactataatttttttagctcccaaatccttcatgataactgatattttatctatatttatcagtttattagtcatcttctgccccgtccattagttataatctctctatagattaactctattaaagtaaaaatagaatgccacactgaaggatagattatttttcaaacaaaataaaacttataggtggaagcgatttggtatgtaatgtaactgtttcttacagaaaaagagtcaaaaaacacttttaattcaaataactactcatttttctataaaagtattttatgtatccccactgtatcaatttccgcatgagtttcactggcacatagccattcttcaattctttctgacaactcattatctgtcagtttcaaacgtcctctcaaagtacattcccaaataactaatatcttccagctattatccgaaagagaactcataacaaattgatctcttctgatatttttctcaattttatctaaccagaattcagttcgggttgccggagttttgaatagatgacaattatgcccatgccagaaacatccatgaacaaacaaaacagcctgatattcatcaataacgaaatcaggcttacccggaagctcccttacctgcactctataagttaccccaaggtcatgaagaattttaacgagctttttttctatggctgtatcacagttacgaattgctctcatatttttactgcgggtggatggattgtgaacatcagccataaattatctatgccgcctgatctttgtttatctgctgttgtttcactgctttcgctatataaggagctaataatttagcaacagctgtaaatacaggcacaacaactgagtttccaaactgtcgataagcttgtgtatctgaaactggaatatgaaatgcttctccctgaggagactcaaaccccattagccgtgcgcattctttcggtgttaaacgacgcgggcgattttcctggttatctggattatcaaaatcctgttccccaagctttttattccatccccggtcaataaggatttctgagccatctttatggtaacgcgcagaaagtgtgcgagtaacactatccttattgttgggatctataaggccaaatccaaagccatttcctttagcctgatgttttctggcataattatataaatatttccagagattaggggtaagaatatatttactgtcaacttctggttcaagtaaatccgcaagtgttggccgttctttcgggaaatatcgactaatatccctaagtgtaaatccttgatgaatattcagatctttccgaaaaccaactaacacaattcgttccctatgctgaggcaaaaaatattttccatcaataattttaggatcattcggccccatgatatcagcatcagcaacagcgtatcccagctcattcaatgtattcatgataatacggaatgttttccctttatcatgactttttaagttcttaacgttttccagaagaaaaatagcaggttttttagctgtaataattctggccacatcaaaaaaaagagttccctgtgtatcacactcaaacccatgagcacgaccaagggagttctttttcgaaacacctgctaatgaaaatggctgacatggaaagcctgccaaaagaacatcatgatctggaatttctttatcaatatttttataagcttctttttcatctatttttgagttttcacttaatgttatttcacgaatatcagaattaaatttatgggattccggatcacaataccagtttgctttgtaggtacgaacagcatctttgttccattcgctggtaaaaacacactgaccgccaatttcttcaaaaccttttcgaattcctccaatccctgcaaaaagatcaatgaaacggaaaccgtattgaggatgatttttgggtggttcaggtagcattttttggagcatagcaacttcaacttctgttaacaacttctggactgattttccgtgaaaccagcgatttaaagtttcacgggtccagtcgttataatttactctgcgcaaaagttctgcaatagttttttgatcataagactcaaaaagttgtcccatcagctttttatctgatgccaacttttgctgctgcaataacttcgatttttcatggagatcctgggcatacgaaaaaaattctttcattttatttatccgaaaaatgttttatttagtgatattatatcactcgattgacccagaataaagaaatttatggatatttatacagttatttactttacacagtgactcatctaaccacagcaccgatggcgaatggcaccggcaaaacaccgctggcgccgacgtcggcagaccgcaccgccgattatctggcgaaactcccggcggcggataacgccctgctgcaacagatagaacagagtctgaccctggccccttactggctggacggacacgctatcgcggcacaggccgccggcaaactgggttaccacgccgtggctgacgctatccgcgatgaactccgggcctttcttgaccgtctgccggtcctgcaaaacctgtctttctccgatatgagcccgtttatctccgacgccacgctgaactggctgcatcccccggcgaccgccaccgtcagcagcggcaccacgccggaacaggacgctgtctggcactgttttcagcaacacggactggaagccgccctccacgccgcggagcaatatcagcaacacctgaccgaaccgcgggatcaattctacggtcagttactgacggcccagttactggagcaggcgggcatgcacgcactggcacaacaacattaccgccagctgcgccaggcaggacaacacctgtcactcgccgactgggaacccggcctgctggcggccctggcagaaaaagccccgatgaccgcccccgccaagacgacgaccgcaaacaggagcgttaacccatgaactggctttctctgctgctcaacaatatcaaaaaaccggcgaggccgcgtctgccgcccctgaaagccaccgcctcgctgatactggccctcctgccctgtctggccctcatctggctctggtggtggggacccggctggcagtttaagcagacgcatccgctggacaccctgtctgcccgctggctggcgacggtgatcatcctcctgctggccctgagcgttgtcgggataaaaatctggcgccgcctgcgccagcttgaaaaacttaagctggagggggaactgaacaccgtcgatccggtgcgcgccgatatcacccgtcaggaccgttatctccatcactggaaagcgcaactgcaacgccatctggggacccgggattatctctaccagcgcccctggtacctggtgatgggtaacaccggcagcggcaaaaccgccctgattcaggccggctgccggctgactgacattgccgccccggacaccctgagcggggaagaggcgctgcccctgcatctgcgctgctggctaggggagaaagccgtcatcattgacccggacgggttccttatcgaccagatatcgccgccggacaccggcaaaccccagctgcccgcccgcctgtggcaggcgctgctcgtctggctcaccgaaaaccgtcagcgccagccgctcaacggcatcatcctgacggtggacattcaccgcttactgaccgacaacaaagcgcagcgggaacgggttattgccgcgcttcacctgcgcctgcaggatctgcgattaactctgcatcatcctctgcctttctatctggtgctgaccaaactcgaccggctgcacggtttcagcgccgctttccagtcactggacagcgcgcagcgcgcccagatcctgggcgtcacctttagcctgaatgcgcgggatgagcagagctggcgcactgagctggcccagttctggtgccagtggatgcagcagctcaacgcggccatgccggacatgatgctcaacaaagtcgatatcagtcagcgcagtccgctgttcagcttcacccgccagatacaggggctgcacagctatctggtgccgctgctggaggggctcctcgacaacggcggcccggcacagcccggcctgcggggggtttatctcacctcgtctcaacaaatcggccggatagatgacctgtttacccagtctgccgccgtgcagtatcacctggggccgcaggcttttcccacctggccggtggcggacaccgtgccctacttcacccacgcgctgtttgaagcggtcctgctggccgaaccgaatctggcggctgaaaaccgccggtggttaagccgccaccgccacacactgctgaccttctccacagcaggtgccggggtggtgctggccctgtggagcggctggcactattactatcagcagaactaccgggccggtgacgaggtcctggcgcaggccaacatcttcctgtcggtgccgccgcccaccggcgaagaccgtctcggcaatttacagcttcccctgctcaatccgctgcgtgaggccacgctggcctacggggattaccatcagaaagggctgctggcggatatggggctctatcagggcgcagcggtcggcccgtatgtggaaaacacctacctgcaactgctgtctcagcgcttcctgccggccttaatgaacggcctgctggatgacctgaaccgggcaccgaaaggcagcgaagaaaaactggccgtcctgcgtatcatgcggatgctggaagacggcagcggccgccataaatcgctggtcgaacattatatgcaggcgcgctggagtcaggcgtttaacggccagcgcccgttgcaggcgcagttactgacgcatctggactatgcgctggatcacaccgactggcgggccgcacgggaggcgggcgatcaggccgctatcagccgctttgcaccttaccaactgccgctcatcaatgccgagaaagaactgagtcagctctcgatttatcagcgggtctaccagaacctgcgcattaaagcccaggattcactgccgccgcccctcaacctgcgcgaccagattggcccgggctttgaccgcctctttatggccaataatgacaagcaactgattatcccgcagttcctgacgataaacggcctcaacaactacttcgtcaaacaggacgaccagctgatcgacctcaccgtcatggacagctgggtgctgaacctgtcacacaacgtgcagtacagcgacacggaccggcaggaaatccagcgacaaatcactgaacagtacctgggagactacacggccacctggcgcgcggccatgaacaacctggatattcgtgatttcaccgatatcccgcaggccctcagcgcccttgaacaggtcatcagcggcgaacagcccatcagccgggccctgcaaatcctgagcgacaacacccgtctgccggagattaacgagacgctgccggccaaagcccggcagccgttacgtgataccccggattaccgcctgcgggtgcgtattcaccgggaattcgcgccggaaaccgcggtgctggaggagtccggggacaaaaacagcaccctgcagggggtttatcagcaactggcggccctgcaccgttacctgctgggcattcagaacgcgccggtcccggggaaagccgccctgaatgccgttcagcagcggcttgaacagcataacgacgacccgattttcgacgtacagcagcgggcgaaaaccctgccggcaccgctcaaccgctgggtcggcgcactggcggaacaggcctggcgggtggtgatgcgggaagccatccgttcgctggaaatcgaatggcacgacaccgtcgtcagacagtaccagacctacctggccggccgctatccgtttaacccggacgcgacggaggaggtgccgctcagtgagttcgggcggttcttccggcccggcggcacgctggatgccttctatcagcagaacctgaaaccgtttgtggaaaacaacctgacccaccgcgcggacggccagcaacttatccgcccggatgtgctggaacagctgaaacgggccgaccgtatccgcgacaccttcttctcgccgcaaaacggtctgggggtccagtatgccattgagcccctcagcctgaccggcaataaacgccgcagcctgctcaatctcgacggccagctgctcgattacgcccacggccgcagcagcattgtgcacctcatctggcccaacgcgatgcgggccggggtggaaagccagctcacactgataccggatgccggcggcaaatcgccgcgcgccatccgcttcaccggcccgtgggcccagctgcgcctgattaacagcggcaaactgactaacgtacgtcaggattcgtttgatgtgcggttcacggtggacgggggcgacatgacctaccgtctctacgtggatgaatccgacaacccgtttgccggcggcctgttcagtcagttcagactgcctgacaccctgtattaagggcaaactgtattaatagcaaattttattcattgcaacatagcaacccaccctgtcctccgcgccggcggaggcaggttaaaggatgaacggccatgcgtgaaccccctgaaaacctgattatccgcgccggcggcaacccgatgacgctgccggcattcacggccatacgcgaagaaattaacaaaatcaaccacccgtctcagccggcggtgaactggccgctcattgaatccctggccctgacgctgtttcgctcccacggcgtcgatttgcagagcgcgatttactacaccctggcccggatgcagctcagcggcctggcggggtttaccgaaggctgtgaactgctggccggggtgatggtcagccagtgggatgacctgtggccgccgcagccggcggtccgcaccgacctgctggactggtttaacacccgctgcggccacgccttacgccagcacgattacaccgcccgcgacctgcggatgatttaccgggccgagcgggccttacagctgatagtcgaccggctccagcagtccgacctgaaacgcctgccgaaggtcgacaacctgctgtggttcttccagaacaccgccaaaaaactggaacagacccgcatcctgcccaaacccgccgccaaacccgtgcagatgccgccgctggtttacctcgccggcaccgaaccggcaccgtctgaaccggacaccggcgacgacgcgggatatgccccctctcagccgaaagtccaggtccgtttccctgaaccgcccccgcggccgatgagtgccttacaggggttcggcctgggcctgttactgggtgcattcgtcctgaccgggacctggctgggattttaccggcctctgcaacagcaattcactgccctgactgacacctgtctttcctacacaaatattttaacccgcccccgcgttattgaacttttccctcatagattgatctcaataaaaaacacgacttgaggtaatctttatgttttcaaccagcgccgaacaatgggcaaatgacacgtttcaacatgcggaattaggtgataaacgccgtaccaaccgcctggtgaaagtggcctgttcgttggctaaccatataggacaatcgctcgtgcaatctcttgactctcctgccgatgttgaagcggcctaccgactgacccgaaattccgccattgcgcctcaggccatcgccgaagccggatttaccgccaccgtcgctcacgctcaacgttatcattgcctgttagcgctggaagacacgacaaccctgtcattttcccatgcgtcggtcgccgatgaactcggctataccacctcaaaggaaaaatcccggggcatgcaggcacactcggtgttgttatttgcgcctgaagaacaacaggtcgtggggttgatagagcaacagcgctggtgtcgagatgtcagtgattatggcaaaagccgacaacgcgatacacgcccttatgaagggaaagagagttataagtgggaacgggcctcacaagccgtcgacagccggttaggggagcagatggccaacgtgatttctgtctgtgaccgtgaagccgatatcatcgaatatctgcgttataaaacgagccaaaaacaacgtttcgtcatccgttcgatgcaaaaccggcgtatagaggaaagtcaggataaactttatgactttattagccggttacagagtgctggagaacgattagttcaggtcagacagaaaggcgggcgtcaggcgcgtgtcgcgcattgtgatatcagttatgccgaagtgacgttgaaaatccccgaaggaaaaagcggtgaggcggtgcggatattttatgtcggttgctacgaaaaaggtccggaggatgggctttgctggcatcttctgacctccgaacccgtcaacagtcaggaagacgcccataaaatattcagttattacgagcgccgctggctgatagaagaatttcacaaagcgtggaaaacgggcggcacgcaggtagaagcgctgcgtatgcaaagcaaagataatctggagcgcatgatagtgctgctggcctttattgcggtacgaatacaccagctgcgttttatgggtctgaacaaagaagaggcagagaaagagagctgtgagacagtattaagccccctggcgtggaaattactgtggtcaaaacaagaaaaacgccgtgtgccgaaaaaagccccgagtttgcattgggccttcatcaatctgggaaaactggccggctggtacgattccaaacgcacgggtcgagtcggatgggaacgactttgggaaggctggtttcggctgcaaaccctgatagacggctatttgctggctaaatcagttgatttggagatctgatcaagagacagcgcgagcgggggctccccgctgaaccccgtcgataagcgggcttcgccagcccgcacccggccaacccgcgtcagcggcgcagacaagctgccccgccgccccgggttatcgacaaaacccggttctggcagaaaaagcggggcgaaacccggcactgacatcggggaaaaagtgagctaaaatcggcaaaatgcccgtcggggcgagttgatatgttctttaacagggcgggaaaaagcggtgaagaaaaaggctgctaaatcagggggaaaggtccgctcaactgtatgatggcgtcggaatagtgcctaagatcctttaaatcttagtggtggcgttaacccgtacagctatgtccatgatccggtcaattggattgaccctctgggattggcagggtgccctcttattaatcgcatcgttaatgatgcgaataaagttgcgtcaccgggagggcatataacgtctaagcaagcagaaatattgaaaagtaacttacctgttgttcaaaggcgtagtgctcttcaaaatcaggtatctcgaaaagagtttgtgagagatcaagattatctaatgaagcaatgggagactaatacaggtaggacatggccgattggtgcaactccgcatcatataattccgttggaaagtggcggagcaaataagtggtggaatttaatgcctactcatggaacattacctaatcactcactacctggaatacctggcccacatgctgcgggaggggtccttcgcactacaatccaacaaggaagaaaagctcttcctccgggaaccataactgatttgagattgtaatatgattgatattaacgaagaattaggacaaattaaaaagacgagttttttctctaatatgggtttatctgatcttcaggatgaagatgtaattttgattgagagtgttgaaaaggtatttattaatccttcggatattgaatttaaaggttattataaaaatactaaatggcttccaacatcaccaactcaagaagatccattttataagaagcaagatagcccgaaagatcttgtagaaatcagagtgaagataaataaagcggtcatgagtatgactaaagagttggctaaaggtaaatttatatctggaccacatgattttaaccaagtagcaagaaatgctatatgctatgcatttagacaatatatatctgaaaaatatcttaatcttggtaataaatgggaaagaatagtaaaaatatattatgcaggacattggcctgttggaatttctaaagaaaaaataatagtaatttgatataaaagccggaagattttcagagatcttccggccttattatgatctattttggtgcatgccaacggtaagccagcgccgattggagcttatcgatggtatatttataagagaatgaatccaatggtttaattccatctcaaaaaaacccagtttattgtcaaggttatatttcttagaaaatgaaattttctttatccatgagcaggacaatatgattggaatgattcttaatgatgcttttcatccacatgaagaaaatatgattttaaaaaaaataatcagatggatatgaaaaataaaatatggtctggtcaagtatctacaacaaaatgtgggagagtaaattaatgaattattatgtattaatgaacgattataattcttcactaatgccaagatatcttcatgctatagtagataccgagaatcaaattaatgaaaaatgggattatgaaggctccaggcatgatataccttattatctattagataaggaatgccctaatactttatatttgttatgtaataaaaatattgggaaattgtggtttaattattatcaacacaatatggctcatatcctatctgatagatttttcgatattatcaatgagtttaaattaagtgatcatgttttaaaaaaattaattgcgacatctattaaagatggaaaaactatcaataactcattaaattatcttttttttactgacaaagagttatttctaaatgaaaaatattcaatattggaaaaagataaatatggaaatttaattcctcataaattatcttttcataatgaatcattaaattatgatattttttcaatacggactactttattagcaggatttatctttatttcagaaaaagtagctaacagattaattaaagaaaatatcaaaagaataaagctaattaaattagatgaagtcttgaatcactattgtgtagattttaagtacgacattaaagctaatgtcaaaaaagggaaaataaaattaccctaagctaatagtaaaaagccggaaagatccctgtgatctttcagctttgttatttttatgtttaaaacaaatagattacagagttggtcttatatattaaatatataacttaaaatcataaaaatataaaacaaataagaagataaacagaataataatacagaaaaatataatatcaatggtaaatattaacatagtctatattttagctattttattcttttttttctcttaaacagcaaaaaaccggaatcacttccggctagcttctttcttaccgcggtgaatgccacgccaacgccgacgggttagtacaatggcaaggcatcaaggtaatcacagatatactgatgcaatgctctagataaaataaatctacatcaatcaattaataccatatcgaaacaagtagctaacatccaaaatatagctaaaaaagatatggagaatggcaatattattaaacccaaagatatgtataacactaatattcagggggaagacgtaaattaaaaaatcagacaaagcatctttgatgctctggagtaaaattttaggataatttaacatgggtaatataataatcttttatatggaacccgttgaattttttttaaaaattctgattctcatccggttctattgaaaaatttaatgaacacgaaattattgataataaaaatatgacattaaagcttattttcgatcaagacataccaggcaactatatggttttgagtaattttttctctgatctggtatctgaattttatcttcatgaggattataaaaaagcagaaaaggatatccttgacagaataaaaacatctactcaggatcaagttaaagaaaagatgagaaaaagaaaataatatcttataagaaagaagcaagagttggcttataacatagaatacgataattttctaaatgaagtaaaatatacctagatttgccagaaacatggaaggatttaaagggtgtaaatcatgacaaatatcataggaaataagtccacttttgctgttgaatactctcttgaaaatagaaaaaagttaattggtcgggcaagactctggattaacgggatttttttgggaagtttaggcgatacaatattttttgatggatatttaattggtgggcttacagaaattttaaataaaaataagttagatgagagatatttacttgatgatcatcatttaatctatgatttattagaaaatgacatgaatctctttgatgatgaaaaatatgatttagcaaaatctttctctgttaatttaggtacatggtcggattattttgatatgtactcatataaattaaccgataatctcggtattattttgtggaaatttattggtcataatgatgcattggaagatttaataggctatccacgctgtgtattttccgaacagtttagatatgatgaattggttaacataataaataggcttcatattgtaggatcttaatagtgaagctttttgctatctaaaataatcagttatagctgaaaaacatgtatatgaaaattaactaacccgaattctggataagaaattgacatgaagcctgttccaggagcaatgttttggtgcacgccgaaacagctccggggaggaacaggctatgaacaagttagttgaaattttctgcgatgtcgatgatttttgccgcttcttcattcctcaatgggaattattttgtttcgaaaaagggtaccgccagcgtcatcggcaaggccatatgcaccccagtgaaatcatgactattttgatcctttttcatatggcgcattaccgtgattttaaacatttttatctggaacatatttggaaatatcaccacaaagatttccccaccctgctcagttatacccgttttgtcagtgttgccccttccgttttggtcccactatgtagttatctgactcaattaaaaggaaaaccgaccaagattgcttttattgattccacgagtttgtgcgtctgtcataacatccgtatcccgcgtcataaggtttttaagggaatagcccagcgcggaaaaacatcaatgggctggttttacggcttcaaattacacttggttgttaaccatcagggcgaaattctcgcgctaaaagtgactcccggtaatgtgaatgatcgagagcctgtacgcgaattatcaaaatcgttaacgggttatctttacggtgataaaggttatctcagtcaggaactggccgatgatttagccaaaatcggtgtgactttcatcacgaagaaacgccgtaatatgaaagcacaagcgctgtctgagtggaataacttaatgttaaaaaagagatttatcatcgaaacgattaacgggcaattaaagaccatttctcaaattgagcactcgcgccaccgaagtataaaaggctttctgttgtgtgttttaggtggattgattgcttacagccttaaattgaaaaagccatcactgaaaattttctactcagagaaagatattttaatgacggcttaagcagaattcgggttaactaactttgaaaaatcagccggaaagatccccatgatcttccggctttgtaatagtaatacaggaacattccgcagggcatatatatggcccaccggggactcctggaaatcaggggcctcattttaatcctagagaatataatcctgcgtctggagatggatttagaaacaaaagtgtcgatggattaccagaacattataattttccttgaggcaaataaatgtggtttgatcatgctatttttaaagaaaaaattaagttcatgtttaataatgaactatcgatggaacatgttggatttgaacaatttttatattatgacacatctagattaaaaatttttttctgtagcaaaaatataccaaacgttattccagaaaaatggaggaggaaaaagtttaattgttttatgatcacattgacatgtattgatgtttctgtattggaaattaatgggggaggagttgcatttgaatgtacccccattattgaatcaacgaaggaaaaaacagaaattacaataaaaaatgatggcttttacctccattgttctaccagaacaatggtaatagaggatattacaccgcattgggatgtacgatggactaaataatataaatagccggaaagagcccacgagatcttccggctttctgatgatctatcttggcatacagctatgtccatgatccggtcaattggattggctggctgggtgtaatacccaatttaattccagaaaagatgctcttagagctgcaaaaagagatattggcattcctaaaaaccagcgtccaaataagtatttaatcagaaacatcaaaatacaaaagaatatgatcaggtaatgttaaataagattccaaaatagtgctacatcttatgccacccataattctatgtataacaatgggttgaataaggctatgtgtagcagaattatgaaacgttatttaacagacagaaatggtcaacctatcttaaattaaaataaaaaacctatttggacaaggtggtgtaggtgatcaaggttaattttaatgtgaaacctcatgataatattagaactggtagcgttgatggaacagtagaccattatagttactaatggagatatatacccaagaaacttcaagatgcagtttttagcacctgaaaatggtcgttaattctagacatcagcgagtccgctatatccggtagcgttgtggtgaaaaatttgaagacgttgtctcgaaattcatgtttatccgcaaaataacggttatttcgaacctgttcattcatgaccttccataatcgctctattgggtttaaatttgggctatagggaggaaggtaatgtaactcaatattgctaacataagcccactccttaacaagatgagctttgttgtaacccgccccatccacaataagatgaattttttgatgatagtcaggataagactttcttatttcattgaaaaaacagcaaatgttgtagtcattgatggtttgatattcctggaacaccgtacgaccaatggcattcaggttgagcgcgcccaatatattcaggcgagtccggcttcctgttgtttttactgtttttttctcgccttttcgcatccagccataaccgagtttggtgccttgagtcgggtgaacagcatcaagaaaaaggatgggttcgtctttcgctgtgactttaagattctcataatattcaataaattgtcgctgtttttctgcgtcgaatttatgagggacgccacaaggttttttataagaaaaaccctgacggtgtagccatttattcatgccgggaatgctaaaggtaatattccagagctgagcaacataggccacgatttcatgggtgtgatggaaaagatgttgagataagtgattgattaaaaaatcagtttgttcttgagaaagcaaactatcagaccccccattatcagatttaagtttaccttgattaaggtaatcgctgatatgacggttaacggtcatttcatgaagacgcagggcctgagcgatcatcactgaactccagccttcagaggccagcaggaccgctttgatgcgatcacactccctcttatcacggcaggtgtgatggagatgttcaagttcggctttttgttcatcggtaatgaatattttcatagcgaggataatgatctccatttcggataaaatcaagcatcttcaatgattacgggtatatatgtattggactgatttaccaggtagtgaattgatgaagcgagtttattcaaatccaccatctatcaatgagatagatattttcagcattgatgtaaaaagggatgggccaacagtaattatgtcatttgatcttgtaaatagtcttcctgataaaactccagataaatggggtaaagattttaatagatgtagagcaggtatttactgctttggtgtttctaacttaaatatgcaaggaattggaaccgatatgcttacaaaaatagatattaaaatgatggataataacaatatagtgagtattaaaaataacgatatagatataaaagttatttgctcacatataagtcttactggcccttctgtttacataagaaaataaaaagatatgtgtttgtaaaattggtataaaaatcactaaacaaagccggaaagatccccgtgatctttccagctttgttatttttatgtttaaaacaaatagcttacaaggtaagacttatatattaaatatataaattaaaatcataaaaatataaaacaaataagaagataaacaaaggaataatacagaaaaatataaaattcataataaatatatacatatgctatattttagctattttattctgcttttcctctgaaacagcaaaaagccggaattgcttccggctggcttctttcttaccgaggtgaatgccacgccaacgccgacgggttagtgtaatagcaaggcatcaaggtaatcatcacggatatactgatgcaatactctggataaaataaatctacatcaatcaattaatactatatcgaaacaagtagctaacattcaaaatataactaaaaaagatatggagaatggcaatattattaaacacaaagataggtataacactaatattcagggggaagacgtaaattaaaaagtcagacaaagcatctttgatctctggagtagaattttaggataatttaatctgggtgagataataaatttttatatggaacccgttgaattctttaaaagctcggattttttatccggttctattgaagaatttaatgaatatgaaattatggataataaagatagggcattaaagcttcttttcgatcaaggcatactaggtaactatatggtttagagtgattttttctctgatttggcatccgagttttatcttcatgaggattataaaaaagcagaaaaggatatccttcacagaataaaaatatctacccaggatcaagtcaaagaaaatatgagaaaaagaaaatgatatcttataagaaagaaaaaaaggttagttgataacatagaatacgataactttctaaatgaagtaaatgacgaatgtaattacatgttaaatatgataagcatttatcgatatttattttattttaatcaagacgctaaattagaagaaatattttctatatttaaaaaaggagctatgccgtgcggtataaaaaaagataaaaagacatgaattattttcaatcctattattttgaagaatagttaataaaattatagatgaactgccctcaaaaactaaattcaacatttaatgactagatttagagaggcagttcacaatcaccagatcttccgatgttcctattgatctaccgtggcgcatacccacagtaagccagagcagattgaagcttaccgatggcatccctaatctgatacgcttcctcgtcattcacggcacaggcccgtatctccgcccagttcagccgcttaaccagttgggccaaggccagcgcttcaatgtgggttaactgaatgtcctgcaaatgttcaatcaccactttcattttatcctctcccttaacccgcaaaaccggttatcagcgcccgcatctgctgcttaatctcccgcagttgggcctgttgccgctggtactgctgatgctgttgttgcgtggcttcactctctggaatcagcaccagacaaccgtccatcaccttcaccgtaatctggtgttgtgttcaataagagttgctccccagattaaataccgtaaaacctacaaaaccagcaaaagatgccacacctttattttcacgtgccatacctagcggaatagcaatcgcgaacatcacaggcaggaaactgaaagccaaggagctgattttactcatccaggcaaataacaaccgaaaagctgtgtgatctaatatcggtagtaacgtaataacctctcggctactgggagagctgccaattccgagcataattccacaaaatgatagtaacgccacgggcaacataaatgttttacccaagctctggaagaattcccatagcgtaattttctgtttcttctgagtgagcagaatgactccagtggatattattagatactatttaataaatagcactacgggttatctggtgaagtggttcactattgataaatattttagaggaggattattggtttagttggagcactaaaaacaactcaaacaatcattactctcctttaaatcattcatatattgaacaaagaacaggcagaaccgtggtattattattctgccaaaggagaagtacatttggttgaagctgctgttatattttgaatagatatcattgtcatcttgtcaggaaaatctctccaacttctatttacaacggtactaaggtaaaaattcagttttattcaaattctcctaataattcatttgagtaatagtattaatcattcaattaatctataaggtaaaaaatataatcacctgataattacaaattgatattagttatatatagccaagtaatgcagctttagctattgcctggaatttattcttacaatccagttttttgacgatattcattaagtgaaaatcaactgtgcttttagtgacacaaatggttgatgaaatttcaattgatgtcatcccatctgcggtatatcttaatacttctaactctctgtttgaaaatgaagtttcatcaatatagaacgattgcaaatactttgtgtgtgatgttaagtatcttattatcctaatatatactcctaaaatttctccactacatttatacattgtctcgttatcaataggcccatcttttcccgcaacagaaaatattccataagttcctgaaaatgccggaagaccaaaggtgattccagaacgaaatccatatttttgattcacataccaaagctcttgcccattagatttggaaaaaaaatctaaatcccatatttttgaaaaagaaggtggcacaggccggaaatttagaacgggatcaatcatccaatactttttttctatataaaggtcccgccaagattcatgataattattaaagaaatacacttctcggttagagataggaaagcgcgcctttaataaaagggagaacaaactaaaccccgaaattttgttaataagctcacaaatttcagctacaaaatggggatctacatctaatttatgaaaattatagggtaaggcatatggtcgattaatattcattcaatgtcctcttgaaaattaagaatattgatagtgaatcctaatatttattatagtagcaaaatttacatttaataaagaaaataattatttactgttatacagaaacaatgtctgataaatcacaatgtattattggtaaacaggggaaattatatcaataggattgaaatcctaataatcagggaaaataatatatataaaaacatattatagtcatatgaagaatattaaactatctccaagccaatataagtgattatttaatgttttaatctaaaaccttcatccgtcattccgcaccgtatttctgatttaaaaataatgtgatcttacacaggttttttgtattgatgacatcggtggggttgacggtaatcgccaattttgatctattacttttatttgccggaaagcgaatatgtccacacctatacctgccattaaacgtctcgatcatcttggccttatcgccgctttttgtcatgaagccggtttaccccgcatgattgatgccattatcccaaaatattcatcgcatactgtctctcacggcgacgcttttctggcgatgatccttaacgggctggggtttcacagccggacattgcacatgttttccggcttttttcaacataagccgattgcgcgtttaattggtgctgacattgaagctgaacaccttaatgatgatgtgctcggccgtacactggatgccttatatgaagcgggggtgtcggaagtttatcaggtgcttgctgagcaagtggttgataaattagggttaaatcccgattccgttcatttggatatcacgagttttcatgtcgatggtgactatgacagcgcattgggagatgacacaaaacgtattgcactggtgccgggttatagccgggatcaccggcctgaactgaaccaggttgtccttgaactgatttgcgaaaatcaggcaggtatccctgtctatatgcaggctatgagcgggaatacgaatgatgccaaagcctttgcccagacgatcaaaacccatattcaatgcctgaaagcagcacaaaacagccgctactttgtggccgatgccgccctttatactgaagccgcgatcgcttcgcttcatcagcaaaaacaacgatttattacgcgtgttcccctgacgatcaaggaagctaaacagtctctcctgaacgtgacagcggagcaattcagccccatcagtgagggctattcaggctgctgggtgacgtcatcatatggcggcgttcctcagcgttggttactggtgaacagtacggcggcagaaaaacgtgaaaaccagactttccggaaaaacacactcagggaaacagaaaacgagtctaaacagttcgacaaactgggcaaaaagccctttgcctgccgggaggatgccttacaggcactgcatgattttgagtctcaatgccagtttatcggcatcgcctcgccggaaattcaggcgattaccgcgtatgcggggcgcgggaaacccggcaagcatcaaccccccaaatcggttcattatcaattagccggtcaggcttatacccggttagacaaggtgaagcaggccagattgcgggtcgggaggtttattttagcgaccaatgaacgggatgaaggacggcttgatatggcggcgttactggctaattataaggcacaacaaaaggtggagcggggttttcgcttcctgaaaagtccggaattcctgacgtctgccattttcctgaaaaaaccggagcggatagaagcgctgttaatggtgatgacatgttgtctcatggtttatgcggcgctggaacataaaattcgccatgaattgaaacaaaatgtgccgtttttccccgatatgaagaacaaaccgacacaatcccccaccgcgcgttgggtatttctggcctttgaagggatcagcacctttgaatttcaagaacataaaatggtgacaggaatgcaatcttaccaccatgagcttttgagtttattaggtgcacaatataaagcggtttattcctgaattaggtgcggaatgaaggcttcatgttttatttttcacaacaataaattaactgaaatactgaactatatgaagcaatacctaataaatatatgagtaattttcccatataaactatgatttatcccagtagctgtttcaactttaatagttaattatataaaaagaaagttattagaataataatgagtaagcaaaataacctttcgattcccaataaatagtttaaatatgtaaagaggtgttatgatgagtgaagtcattcagggtaaagatgatattgctataaccaagaattctattacagctgatgtaacctttgttattgatgttgattcaattattgaatatcttcgtaataataatcttaaaagttctctggatcctaaagatccaacagttatccgtcagcatgtatatatagctaattatactccagagcttggattgaaagtggcgagttcatctggtgcccgtgtcacggttcccattaatgcgaatattagatggagggctacaactgtatctaataatttcgactatacgattatattgtataaattcaaaaagcttagtataggagacgatgtcatctctgtcccatcacaaatatggtcacagaaccctatgggcaaaaaagttccaatggtcccttcaggtattaatgcgaatgaggatgaacctaagataatttttgtcgaatctcaagatagttatttccaagcaatagctcataaacccggtgtagaacaatatacatggttctttgccgcttatgacggtaaaaagctcctaggttattatcgatacgatccatatgttgaagtaactaatagctaaccatttgtatatttttatttttcactggaaaattatcaaaatagttttccagtatttttatttttcaatttacttaaatatctttaacaaacactaatttatataataatattattatcttataaagaaaatcttctaacctccaggtaaactctattcccctccataaattcaacaatcttccgacaattattctgccatcaattcagcagatattctttctattatctatttctttagctaaaataacttacaggaactattacatctgtcattatcgtctatcaagctaaataaccgtgaattaaaatttagcttattcttactttcttagattaatctttcctttctttaaaaatcttcctagtacaacccatgctattattaaaaaaaacattacctgttacttattccacttaagttaattcattaataagcaataaaatcatggctcttattaactcattactatccgaataaccaactaattaaaatttctaatagaaaatcgagatataaaagaaacgccactcgttaatcagagcaagatataaccaatagtgtgctttaataacgaataaattagccaatatgtatgtcattactatcaggctatcaccctatatttatgttttatggaataaaatatcatccttatcggtgaattaatgataaaaagaatatctattctcatattaggttgtatttcctttcagataatcgcttcaccggcagagataaatgataatctgccaatgactgaggctagaagaactttgcaagatagttccagggaaattaaccagctgatagaacaacgccgatatcagcaactaaagcagcaggctaatacagtccctgagtcaactcctgcgccagttttgccggaatctaagcaatgtctgccgttaaccggtgtttaccttaaagggatctccctgctctctgttcgggatttaagtacgctcagcgctttgtccccggcgtgtatcagtagtcatgatatcaatcggctcagccatgaactgactcatctttatatcagtaaaggctatatcaccgcccgtgttcagtttattgcgcctaataccgatggagagttagggctaaatgttatcgaagggtttgttgaaaaaatcgaaggcggtgatcgctgggtgaatagtagtatgttatttcccggtctggaaaaacaaccgctcaatatcacgcagctcgatcaaggtttagatcaggctaaccggctacagtccaataaaaccaccctggatattttaccaggaacagtgaatggtggttcggtgattaagctgcataatcagcgcagtaagccttggttattgaatatcaaaactgataattatgggcaaaagagtactgggaaatggcgggtccgcaccaataccagttttgacagcccatttggtttatccgatttcatcagtctgaatgccagtagtacgttagatagcccatccaaccggtatagccgtgcctatactctgctttattcaatgccctatggcgcagcaacattcagtgggtttggtagttattcccaatatgccagccgcccccatttacaaatgagaacaataaagatttatggtgatactcagcaaatcggcatgcgttctgattttgccttctatcgtaatcaatctcagattaatagtgtcagcgggcaattaacttacaagaattacaataattacatcgacaatgccaagattggcgtcagtagccaaacattgagtgtctttgaactcggtgttaatcatttacatatcattccaaccggattaatcacgctcaatctgagtgttgaacagggtttgccttggtttggagcacaaaccggaaccgcttatctcgataagcagttcaccaaaggcaagttgatggtcaatctacatcagcgttttatgctgttcaactcgccttatcagctcaataacctgttttatgggcaatacaaccggcacggtctgcccggtgtcgaatggttaaatatcactgatcggaatgcagtccggggatttagcaaaaatacgctatccggggataacggctggtatctgcaaaatacactgtcccggacgttccccctcgccaacagcacattatcaatgcgtatcggtattgataccggtcgggttcaaggatatcgcagcccacaaggctggcaaagcagcgcaggaatcagttctggcaccacactgagataccaacgcatggtattcgatatagaaaccagtcgaggaaagctactttccaatcgccaagcatctgatgaacccattcaggtgctagtccgtttttcttacaccttttgatggttttaagcagtacccaatgctgtacacacaataatataactaaatatatagagacttaatgtatgaaaaacaaaaaattcaggttatcccctaccggcaagcttgccgcttctatggcaatcattcttgtttcttgttctaccagttttgccagtgaaatcgttggtggtggcgacccagcacaccatcccgatattttcgctgccgaaggtaaagcaacggttgtgaatatcgtgacgccctcctcttccgggctgtcacataaccaatatctggattacaacgttggccagatgggcgtcgtcctaaataatgggctagaggaaggtcaatcacaattggcggggcagcttgccgctaaccctaatttgaatggtcaagcggctaacctgattctgaatgaagttatcagcaggaacccttccctgttattaggtcaacaggaagtgtttggtatcgcagcagattatgtactggcaaacccgaacggtatcacctgtaatggatgtggttttatcaatactaaccgcgcttctctggttgtgggtaatccattgatagaacaaggtaatttgcaaggtttcagtacgtttaataatcagaatagcctgaaaattaaatcggatggtttaatcgccaatgcgatccttgatcttatcgcacctaaaattgacaaccggggctcagtcactgctcaaaaagagattaatgcgatcagtggtgaaaataaaatctcagccacaggagaagtcattgattctcagcaagcgttaaccggtgtgctggatagctattatctcggtagtatgcaagccgggcgtatccgtctactcaataccgcaaaaggcagtggcgttaatttacaaggtactcttactgccagtgatgagattattgttgattcccacggtaatctcaatttagaagcagcacatctacgcggtggaaatattgatctcttgggtaatgatattgaggtaaaaggtaaagtcagcgaatcatcatatagccgtgatggtagcaataattaccaaagctatttcagcggttcttataccaatgatagtaaaagtagtcagtcactcgctcgtactaagcttgaaggcaaaaatatttcattagtcgccaacagtaataaccgggttacagccacggatatcgtaggtgatgatgtgaatctgagtggtgctaatctcactttagatgggcagcaattaaagcaatccactaaaaatattaataaccaacagggttattcttggcgccacgaggtaactcaggaaagtgaaaaactgcatcaggcaggaaacaatatccaggccaaaggaaatgcgagcttaaatgcgacagaaggtgacgttaagatccttggcagcaaaatagatgctaaaggtgagctagcggttacagcgaaaaaaggtgttcaaattgccggtctgactgagacagaaaaaagcgcggaaacaggttacaaaaaaaatcacacggctaaattgcagaccggaagttgggaagagagtaaacagaccgagcgtttgattgccagtgaattacaagcaggaactaatcttaatattaaggcaggaactcgtgctgaaattcttggggcaaaagtccatgcaggtcaaaatctgacactggaagccggtaaacaactgcaaatcgatgttcagaaaacggctgatagccgggctgtacgtgatgataaaaaatactggggagggatcggcggcggtgagaataaagacaacagtgagttgaaagaaaccaaccatgcatctgaattaacagccaatgggcgtttattgctgtcaggcaatgagggtattgccattaccggcagcaaagtgaaggcggtccaaggtgcttttgtaaatgctaatagtggcgaattaaccatcgataatgcggtcagtcatatcaatcgcaaagttgatgagcgaacgggcacggtactcaatatcactagcggttcaaaaagaaataatagccagcaacagaaatctcacggcagcgagttggtttctgaggcggatcttaaattactcggtgatgaagatatcaatatcattggcagtcgggtgcaaagtaccggtgcgcttagcctgaacacgtccggtaatatcaaggtgctctcttatggcgaacagaaacaggttgataaacaaagcacctctctggagccacaaagccacttccaaccaaagggagacaaacagtatcgtgccggaataggtattgaacataccagtaacagtcaaaaaaatcagacggtaacacagcaagcttccacgttgagtggcggtagcatcactatcgatgctgataaagatgtcactctacgtggttctaatctggtgacgaccacaggtgatgctaaaatcaccggtgagaatgttcatctgttagccgaggataataaaaaatccgaagaaaaatctcagagtaaaaagtacgttggggcctatcttaccggaggaatcgataaagtcggttccggtatttatggtcgttatgaaggaaataacagtaatcataccagtacaactgctgttgtttccggttctcagatcgcaggtaatttgaacattaaagccaacggtgaattggttcaggaagggacgaagcatgaagtcaatggcacctataccgcagaggcaggcaaagtcagcaatctggctgtatcgaatacagaatcaagtaccaatcacaaactacaggttggtacagatattggtgtcaacgtagattatagcgctgttactcgcccgattgagaaagtggttaaagaaccggctaaatctgcactggatggcactttaaccaaaaaaggcacacctaatttcggcgcggatattgccgccaacggcagtagtatccagactgcgaacaaaaagtccgaaacggttgtgacctctattcaggccagcgatatcgtcattaaaaccaatggcgaactgtatgatcagggcactcaatatcgggctgataaaggtaacgttacattaaccgccggtaaccataccagtgaagcagcacaaaaccaccaccaaagtagccacagtgaaaccagcggcaatgctgacctacgtgtttataccactaccggtgaagatatttctgcgaatggtaaaggcaaaggtggcacgcaaagcagccatactacgacgaccacagcagtcactagccggattaccgcagcagatgacattaatatccgcgtcgaaagggatgctgaatatcagggtacctctctgaatgccggctcaggcaaagccaatatagatgctaaaggtgatatccgttttgataatgccaccaatagcacaacgaaaacagcaaccggttataacggagaagcatctgctaaagggggaaattcgccagagggcaagaatgttcatatcggtcttggcggcggttacaacatagatagcaaaaacagtaccacagctcaggtcagtgaaattggcggtaagcaaagtgtcactttgagtgcaggcaataacttgacgttgcaaggtgctcaagtgaccggtaagcaaatcgacctgaacgctaaacaaggtaatgttgaactggtatctgctcaggatcgcattaacaacgatggttgggaatttaacctgaaaggtaatggcggaaatgcaagctcgatcaagaaagcggaagatgacagtacaaccaccaccacaaaacagaactttggcggggaagtcaaagtcggtattgatcgcctgcaagcaacgacccaacgtaatagccatattaaaggtgaaaatgttgttatcaacagtggtggtgatacaacagttgccggggcacggatagaggcggatcaggtaaaaggcagtattggtggtgatctacaagttgaaagccgtaaggatactgaacatgggttaaatgtcggtgttgacgctggcatgaattacaccaaagaatccaaagtaaaaagtgacgatatccctaaggacgaatcaactaaggatgatttttccaaagacgatgtgtcgaacgatgaggaattgaaagatgatccatctaaaaacccaaccgaagaaccacaaccgaaaggatggcaggaaagattaacctctacgtttaatagtcttaataatattaaaggtattaatggggttacaggtaaacttaaaagcaatgtcgatattaaagatcgagaaaatgtcggtgaacaatcggttatttccggcaatcaaggggttaatttagatgtaaaaggaaatactcatctgattggtgggcagattggtagcgagaaaggccatgtcattcttaatacccaaaatgtggaacaacaatctgttaccagctatgacaatagtaaaggcggtaacgttgcattacctgattctgttagcggaatagttaaagcagttcaagaaggtgtattgtccggcaaaatacctttagtgaaaacgtatagtaatgaaaccgaaactagtacaactaatggcgaaataattaatcgtaaatctgattaatttgttcttttataaaagatccttcaaatgagggatctttttattgctacctatattgaatatttcaatagttccaattgacaatgttaatgctttttcataatatcaaaaaattaataaacgacttggtaatataattatgtttggaattttcaagcgaaatttagaacttgaaaaatactataattcacaggttagcataaagggctctatatttttccactttcatactatagtagagctaacatgtcttttaaaccatcataaatgccagctaactgtaaagcaaaactgtaacaccttacacttccaacaatattctctataaaaataatcgactatttcctatatgagttgtttctttcagattgattttcatttgagggagatatctcatagaacatattacgcttacgtttgctcgatgtgccatgatatcttttgataaacagttgactgttttcttttgttaaaaaataatattcagggtaattattctctggatatagtaaactggcaaaattaggtacaatttgatttttgtcacgataatcaggataagggaagtactcttcagaataaacaatttctttgtttttgataaaaatgaattttaccccgacatcaataaattgataatgcataccaatcgccttttctatagatttaggacgagttcctgtagaaaagatataggcacgatcccaatgaaatggtgttatttcatttaaatcaattaagcattcctgatttattttgcaatgttcattggcaaaatcggcaatggcctctctaacatcccattttttgaaaaaaacaaaataaacagagacaaaaatagcaaatatgattaaaacaatagacaaatttttattcattaatttcatcttcaattttccccttatgcatagctaattttcactcatacttctttcttatattataataaaacgtcacttatgagtaattattttcgaggattttgaatgtattttatgccaggatgtatatagtataatttatacatagtaactatatgtaataattttttctatttttaacacaaacctcagattttcatctgaggtttttattatggctttagccagtttaagtagcgtcagcttcttaaacataaaaccacccgcatagctctgaggaatccccagaaaatagacaggcatagcgttatgtgatctactgattgttccaccaagtcaataaggtcactgctatgcctgtacgtgaagtatgtcataacttctttaaagatgctttatcaccatttcataaatatcgtcagaatgcattaatcgatgccactatcgctttgattaatggtgcttctcttacgttaaccagcattgggcgctttttacccggaaacgctcacgtcaaacataaaattaaacgtattgaccggctactcggtaatgaagctcttcatagggatattcctgatatctttcgcaacattatttcaatgctcactgagtctctgtcgctgtgtgtcattgctgttgattggagtggatatccgtcacaagaacaccatgtgctccgtgcgagtttaatttgcgatggacgctcaattcctttgttaagtcaaatagttccctcatgtgaacaacaaaatgtaacgatacaaaatgcatttcttgacaggctagcgcgtgctgttaaccctaaagccagagtaattattgttacggatgcaggttttcaaaatgcatggttcaaacatataaaaacgctcggttgggattttgtcggacgcattcgaggcaatactcaactaagacttgaaaaatagggtgagctttggtttaaacggcaagctttaaaagccactacaaccccacagtttttagggtttggtacattatcaaaagcagaatatgcacgttgcgatggttatttttatcttcataaaagaccgaataaaggtagaaaattcaaaaaatcacgatatcgaatggtgcgaaaatctcaggtcaaagatgggcgttcggcagcaatggagccttggcttatttttattagtatggatgattttaaacctcgtcaggtgatgaaaatttacagccgaagaatgcaaatagagcaaaattttagggatgaaaagagtgaacgttttggatttggtcttagagcaagttatagccacggggctggtcgtttatcagtattgagtctacttgctacactgagttcggttgtactttggctgattggtttttatgccgaaaataaaggaatacatcttaattatcaggcaaatagtattaaatcaagaagagttatctctcatctgacattagcagagaatgtcttacgccattccccgctaatattatttgaaatagtgcttaataaaaccctcaagcatctcgccaaaatctaccaaaatatggttttgatttattacgctgatttgtggggatccttcagcgctatgcaggtggaaatcaagggttataccaagaaaaacacctttccgttacgatatagatgttcaagctaatatacgtaactcaaataaggaaaggtgtttatgggaattaaagcacaaagctcagcacatacaaagtggctgtgcaagtaccctatcgttttttcgccgaaatacagacgaaaagtcatttttacccgtatccgttcgagtataagtgagattttacgagacctttgtcagtataaaggagtagaaatcatcgaagggcatctaatgccagatcacgtccatatactggtgagtatcccacctaaaataagtgtttcaagttttatgggatatctaaaaggtaaaagcgcattgatgatatttgataagcatgccaatttaaaatacaagtttggcaacaggaagttttggtcagaaggatactacgtgagtacggtagggctaaatgaagccacaatccgaaaatacatcagagagcaagaaaagtcagatttaatgcaggataagttaagtacacgagagcatgaagaccccttcaaggggtaagccaaagaagcaaagacacttagcttgaacgaagagaaagggcgtcatttaggctcagtcggtaatatgcccttatagggctagagcaaaccacccgctatgcgggtggttatgattatagattatttttcaatgagttatactttttcatttaccgttttcatcaaggctttcaaatacagacttcatataagcgtattgtacattggaaattttttctttaacaacttcgtagccatgagcattcttaacggcaacatacaacccttctttatgaaatttctctaatgcaatgagcgctaatgttttcattgacgttgtatttgaattcaacccaatatgacggcctatttggttattaagtaaatcaatagtttgatcagcgtcattgagaactgcaaattgccggatattcagatcaacccgagggtcaacttcatgtgcatcacctgcatgtttagcaattttctccccatatctggctgccagagtcgcctgccaaatcatatgtcgaaaagcattcacctgcgttccttcaccctgcatttccttgggttgagtgaatgtcccttttttctcatcaccttgtgttgcaaaacgcactgcattagtggtgatatttgtcgaacccttactgaaaaggccaatttccaatgcttcttttgggtacaacttggcaaaaattaattgcttcaccgaaggcgggattgccgtgttttgaccgtcatgaatagcttcattaatttctattcttgatttttcaagatcttctttgattctttttaatcgagcgacttctgtagtgagtgctctacttaatttagctttcatttctcgataatataaaaacaaattcctaacagctctttgatatttattcccaatctcattccaaaaatcatcagacttcttaatctcgttatttaaaaaattattcaaattcttctgggagttaatcattaccctcgatgtcaattcaattattcccacatttgtcgtatgtttcttatcgtaagggtacttattggcatcgattaacgttaatccttcaggtgtattgttaataatattaagcgctttattcattgattcaattgctttttcagatttggatttttgaaattctgagatgtaacgttgatataaaaccagttccccaagcgtcatacccgccaaattttttgtcgcttcctgaggggttttattagttaattctttctgttcagtaataatgctttctaatttggctttttgttcatgtgtaaaaccaggaatagcattgataatattgtcagagtttatcgaatcgactttaatattaaaatcgccaaaattgatgaaaggaatatcaaaatttctttcagcaccagaaatggaacctgccccccaattaatcggcacatctataaaatctgccaatcctgaggcaattacgtggccctgagtaattgaagttacacgaccttcaaagtgaaatttataaccatcattgccagggatagtaacgttaataggcgggaagttcagaggggaaattttcataatatgttccttatagaatataattgcaaaaataattatctagattacacctagcgtttcacgtaatcgtgtcgagtgagttattatattatttttgcaaaaatggttattccgacacagtgctattatagattttattatctattttaatagcaagtttttttgtattactactgttacaaaactaggggaatcgtatgaataattaaatattatccacacgcaaaaaccccgcttataatacttgctccaaaagttgagtttccatccagattcgtttatgtttcatcctcatatttaattttttttggtttattttttcagcttatttagatgtgattgtactttattatcccatatatatacctgtgctcattgaaactgcttgattttcgcccaaatgaagctcatggtatcagtcatgaaaatattcattaccgatgaacaaaaagccgaacttgaacacctccatcacacctgccgtgataagagagagtgtgatcgcatcaaagcggtcctgctggcctctgagggctggagttcggtgatgatcgctcaggccctgcgtcttcatgaaacgaccgttaatcgtcatatcagtgattaccttaatcaccgcaaaatcaagcccgaaaatggcggctctcagagccatctcagcgaaacacagactcaggcacttatcgcttatctgaccgcgaatcttctgcccaccacacaggctgttatccgccttgtcaaagaagcgtgggatatcagttacactgttcccggcatgaataaatggctgcaccataatggatttagttataaaaaaccgaccggcgtgccacacaagttcaacgcggagcagcaacgggcctttatggaaacctacgggaaactcaagcaggaagccggagaccatgagcctatcctgttcattgatggcgtccatcccacgcaagggacgaaactggcttatggctggatgcgaaaagggcagaaaaccgcagtgaaaaccacgggaagccgtacccgtctgaacctgatgggggccctgaatctggccgatattagcaaaacggtagtacgcgagtatgaccgtatcgacagttatcacatcgccgagttcttcattgccatccgtgagacctatccggtcagtcagaaggttcatattatccttgacggagccggttaccaccgaagcaggcaggtgaaagactgggcttatgtgatgaatattgagcttcattacttgccgccatacagcccgaatctgaacccgatagaaaggctgtggaaggtgatgaatgaacaggtcaggaataacccttatttcgcctcgacggccttgttcaggcaggcaatccatcgtttttttacggaaatattaccggaacttgccgggaacctgtcgtgccgtattaatgacaacttccaggttatgaatcctgcatcttcaagttaagcgggtatattagtaatttttgtcttgagttgtctgaataattttttatattaagcttcgctcattttgggatatgggtactataattggcgtaactcagtccttttagtgatttttggcgattgatcagaacgccaaaattggactaagctcccttcaaggaatctattattttgaaaaattatttaaatttcttgatataatgttacataatacatttgcctataaatcggctgagataaataaacatcatcaaactcatgtttatcatgcagtactttgtccctttcagccttagctatttcatgttgtagaataatagctacttcacttttatttaatttctcagaaagaattaatggaagattaaatttcacccaagactatcgcctggaaaatctttcctcgttaagctggtggcatatcactttgacaagtgacttagatttgacaacggaatcatctcgtagaaatattgcataatgagattactcatattcaagcaaggtaactatttgaggctatgcatgccaaagcgtacagaaaaacaggaaacaacccaacatcagccgaaaaggttatccaaaacgcctttggaaaagggaattcgtcacggtaaaaaagcgatttctctgacggtcagagtaggaaattatatccgcactattcctattatcgctcattttatccgtgcaacgctgcgttttaatgatcggatgggtaatcagtttggcgcggcaataacgtatttttccttcttatcacttatcccaattctgatgctctctttcgccattgccggttttattctggcctctaatcctgatttattggcaagactgattaacagtatcgccaacagtattagtgatccgactcttgccaatacgctgaaaaatagtgtcgataccgcaattaaacaacgtactaccgtgggattaaccggtttggcaattgcgctgtattccggtgtgaattgggttagtaatttacgtcaggccattcttgcccaattccatcctgtctgggtgcgaaatcaggaagataatgagaaaatctattttaaatattttcgtgattctatttctctgattgggctattattagcgctggtgatcacgctatcactgacctctatcgcaggctccgcccaagcaaccattgttaagatgttagggctagatggcattgaatggctgcgtccatcttggttcttgattggattagccatttctatttcagctaattatctgcttttcctatggctattctgggtgctacctcgccaccagccagaacgtaaggcgctattaaaaggaacattgatggcagcaataggttttgaagtgatcaagtatattatgaccatgacattgccgcgcctcgccaattccccttctggtgccgcatttggatctgttatcggcctgatgacatttttctacctattcgcccgtttaacgctattctgcgctgcctggatagccaccacagataataatcataaaaataccgaataaatgtgcccaagcagagcgatctgctaataataacccaatgaataaggagctgtttatgccgtttgttaatatcagaattacccgtgaaggtgctacagcagaacaaaagaagcaattaattgaaggagctactcagttactggccgatgtattaggaaaaaatccggcgacaacttttgtcattattgatgaagtcgatactgataactggggaatcggcggtaagaatgtgactgagcttagagctgaagctaaaaaatagccttcgataatgaagggcggtattgtccgccctttttgttgctttaagaggcttttgcctcagacttagacatcggtggttgtgccggaatatcaaccttatccttatgtggtgtcagcgacataatctgattaaagctgtttcttaactggtcgacatccatttccacttcccctttcggttgaatcagaataaatgccacctcttgcgacaggatctgcttcaattcacgattaagcatttctggggtcaaggaagctaaaaatgcttgtctcaaacgctgatactgctcaggggcgatatccaccacattgctctgttgggacaaaaggcgctgattaatcagaatatccgtactggtatgagcatacatggcaaacaactggctgagttgtgcttgtttttgcgcatatagctcatcaaattgtcccttcggcaatcctttatcccgtaatgtgaccaattcagccgccagatactccattgcgggttttaaattaccggctgtcgtgttgagattcagggcacagctcgcacgatgatactggactttacaatccagccccaatttcaacgctttatcattttttctttccagcccaagttgcagatagcgataaagtgcctcgcgggtgatatcactgatccaatagtgattaagcacatgcgaatcattaatcggctgccaattgagatcccaaattaaggataaagtatcttctttctttttatcgctgataatcccgatggtctccggtttcattggtgacaacgctgcaatagtagccggagtatgacgtttacctttcaatgatgaaaacgctaggctgatattttccggcagagtacggctatctacatgtcccgcaacgtataacgtcatcatgtcaggggtataccactgccggtaaaactgtttaagcttctccaaatcaataggttgaggcgcgttttgtgccggatcgtgccctaacagcgttgaacctttcaaacgtctacgccacacgggatcttgtatatcgggtggataggttgcaacggatgtatcagccattttcatggcatgttgcagtgtctcaggtgtaaataccgctttgcccgcagcatcagccagccagttcaacgcgtcttttaatagttcaggccgattatgtggcaaactcaagctatagagtgtgaaatcatatgaaacaatcgctggaggcagtgggtattttggatcaatagcactgttccataactgctctaatttggtagaagataagcttttgctactaaagagtacgactttcggaatcaaccaggtataacccgtttgttgggttttctccgccagtgaccccgttttcacgaccaagcgcaactgtattctgtcgttaggacgttgtggtgtctgcaaaatttgccagttaaaaccgttttccagtttaccttgtttccaggcagggtcaggctgcaaggcttctgcctgcgtctggcccgcaactgccagcattatcccaccaataaaataacgaattttcgtaccctgcatgtgaacccctatagatgtctatccttggttttagccttcgaaggtttaaccattgatgacagaatatgttcccttcgaccaataataacggtagaaaaagcaaaaacctgaattttaacaggcgaaatcctgtcaggcttataacagaggattagacctcaaaccgccatgaatggtttcatgatgacggaggtttatgcttatcaaattgacgattatatcccctgatcagcaggcccagttcatcatcctgatggtatttagggcaagccattggctctgatagttgcgcgttattaagatcccgtgcaatgtcacgtaatgggtgcataataatccggttgatacaccagcttatcgacaccgtaaggataagggccagtaataaataagttgtcagcatcagtgccaacgtattaatgacaaaacgatatactcggttggaatccacttgcaaaatcagatgccctagcggtttagcatctgtcgatactgaaccataaacatgaagaggaatactcacttccacagggatcccaaaaacacgtttagccagttcggggattgggcgatgggtagcaaagctcaatcgtatcacccggatatcctccggtaacaccacatccgcacgtcctaaaatacctacagtgcgcagccctatcagcaactcttttgctttactgagatcggaattaagtagtgcttccgttaaaggtgcctgtacctgaactgccgcattattaagctggctgatataatcatctttacgttgctgtataaaatgacacaattgaatcgtaataaaaatagcaatggtcaccagcgtgacgccggtcactgcggccatctgtttaatggttaacgaacgtttgacgcgcaatttcattttcacttaaaccaatgcctgtagatatcgcagttataacacgtgatcaatggaattgagtatacttgattttatcgctagcgatcctgtttcacttatccaagtcgttatttttctgaaataattgtccttggtagcgataagtcgctaccagaaatataagcaaatatttaaaaggtgataccggctaacccaatatcaccaaagatgttttattgaatatacccgtcatctttcaagttgcctctttgttggctgcactcgctcgccccggtcaccacatagtttgctatgctcccggggattcactcccttgccgccgcgattcatcttgaaatccatagggtataattgccaagcaattattccaccgtaacattttcatcctgatcgaccgcaaaacaggcgatcagttgatcaccatattgattcaattttggctgaaactgagtacaaacgctaagtgcccggcgacaacgagcggcaaatgcacaaccgggcggtggattcattgggctgggcaattcgccggtcaattttatccgttcacggcgtaattcaggattcagccttggcgttgctgataataacgcctgtgtatagggatgacgtggatgactgaaaatcatctccttactgcctttttccacacaacgaccaaggtacatcaccatcacttcatcagcaatatgttcaaccacagacaagtcatgggaaataaagacataagagagccccaattcttgttgtaagtccatcatcaggttcaacacctgtgcccgcaccgagacatccaacgcagaaaccggttcatccgcaatcaccacatccggctccaacattaggccacgagcaatcgcaatccgttggcgttgaccaccggagaacatgtgcggataacggctgtaatgttcggtttttaaccccactttttccatcatctgcaacactttctctttacgttcctgtgcgtttaacttggtattgatccgcagaggctcctccagaatctgcccaactttcttacgcggattaagtgaaccataaggattttgaaacacaatctggattttctgacgacgtagcttttcagagtctttatttggcaccagcagatcttgcccctgataataaagttccccgtcggttggcttttcaatcatcgtcagcaatcgccctagcgtggatttaccacaccccgattcaccaacaacggctaacgtttttcccttttccaattcgaaagagacgccatccaacgcttttaccgtcctcgcaggtgaaaagagcccccctttaatcggataatattttttcagatctgtcgcttttaataacggcacagtggatatttgctgcgccggataaagatactcactcatactgtcggcctccccgcatcatccaacggtatatggcatttcacctgacgttctcctaccgttcttaattccggctccacctgacgacaatggtcatttgcatagggacaacgcggattcagtaaacacccgataggccggtcatatttccccggcacaacacccggtaaagaggcaagacgggatttatccgtagcaaattcaggtaatgcccgaagcagcgcctgagtatacggatgacgtggtgcccggaagatttccgatgccttggcggattccaccacctgcccggcatacatcacgataatatgatgagcagcttctgcaaccaatgccaggtcatgggtgattaatattagcgccatattttcccgttgttgcaactccaacaacagttcaataacctgcgcctgaatggtgacatctaaagcggttgtcggttcatcagcaatcagtaattttggccggcaggcaatcgccattgcgatcatcacccgttgactcataccacccgataattggtgcggatacacatccagacgcgatgccggatcagggataccaaccaaggtcaacagatcaatcgcccgctggcgtcgggtgcggcgattgccgccttgatgcacttttaacgcctccataatctgaaacccaacggtataacaggggttcaagctggtcatcggatcttggaagatcattgccacttccgcaccaaccagttggcgacgttcctgttcagaaattttggtcagatcacgctggttaaattccagtttgtcagccatcactctacccggataatcaatcaatcccattacagccaatgaactcaccgatttacctgagccagattctccaacaatcccaacaacctgcccttgctcaactcggtaactgatgcggtcaacggcgcggaatggtgcctcttcgtcaccaaagtgaaccgataatttttctacatttaacagtgccatttcgccacctcactactgcttgagtttaggatcaagtgcatcacgcaaaccatcacccatcaggttaaacgccaacacggtcagcagaatcgccacccccgggaatgtcaccacccaccaggcactttgtgcaaactgcaatacatcagacagcattgttccccattccggcgtgggtggctgcgcccccattcccagaaaacccaaagcagccatatcaagaatggcattagaaaaacccagagaagcctgcacaatcagtggtgccagacagttaggcagaatattgataaacatctggcgcatggaacctgcccccgccacctgtgaagccgtcacatagtcgcggttaacttcgactaataccgcagcacgagttaaacggatgtaatgtggcagagacacaaaggtcaacgccagtgaagcattgacaatggatggcccaaatatcgccaccagcaccaaagccagcaacaggcttggcaatgccagcataatatcaacgatacgcatgatgataatatccaccacaccaccgaaataacccgccagcacccccagaacaacccccatcaatagggatagcaccaccaccagacaacctaccagcaatgaaagccgagcgccgtacatcagacgcgaaagtaaatcacgcccaacatcatcagtacccagaataaactgccaatttcccccttcctgccatgctggtggcgtcagcaaagaatcgcggaactgttcagccgcaccgtgtggggcaagcacccccgccaacagagcaaccaacaacatcaacacaatataaaccaggccagcaacggcccctttattgcgcttaaagtaataccagaactcctgcatcggcgtcataatcttaggcgcactgtttgcaggctcagtcacttgagacataatgtgctccctatttcttatgccggatacgcgggttaacgacgccgtatagcaagtcaactatcaggttaaccaagatgatcatgatcgccaccagtaatacgccgccctgaaccaccggataatcccggcgctgaagggcatcgatcagccagcgtccaagccccggccaagagaagatagtttcagtcaggatcgcccccgccagcatcatgccgacctgcaagccgataacagtgacaaccggcagcaatgcattgcgaagcgcatggaccacaatcacacgcatacgactcaaacctttagcgcgtgcagtacggatataatcttcacctagtacttccaacatagaagagcgggtcatacggacaatcactgccagtggaatcgtccccaagacaacggcaggcaaaatgatatgcatcaccgcatctttaaaatcaccggcttcaccccagaatagtgtgtcgatcagcataaaaccggtcagcggataactgtcatcaaggaaaacactgtcgcttatccgcccggataccggtgtcagatccaactggacagaaaccagcatgatcaacatgatcccccaccaaaagatcggcatggagtatccggttagggaaagtcctatcgcagtatgatcaaaaacagaaccacgctttactgccgccaagacaccaacgggaatacccacagaaatagcgaacagcatggcgcatatccccagttcaagcgttgcctggaaacggggaacaaactcttcccacaccgagatacgacttttcatggagataccaagatcaccatgtaacacattacttacataatgaaagtattgctgccaaagtggtttatccaaccccatttcggccattagctgggcataacgctcagccgatattccacgttccccggccataatggtcaccggatcgccggggatcatatggacaaaagcaaaagtcagtaaagtaatgccaataaacgttgggattaccaaccccagacgtcggagtatgaactgcaacatatcccgaactctctttttttaaatgccggttacagctctcaggccgtttggcttgataagggggaggactttccccctttggctcacaatttaatcaataccttaagtcagaacaggattattcgagagacacgttgctgaaaatatgtctgcctagaggatcaacgacgtaacctttgacctctttacggatcggttcatacaccgtggaatgagccacaatcagggctggaacctgttcgtgcatcacagcttgagcctgtttataaagctcaacacgtttagcatgctcagaaacgatgcgggctggctgtatagcatcttcaaacggtttgtaacaccatttagagtagttggaacctcgctctttggctgcacagctaaacaaagttgcgaagaagttatctggatcaccattgtctcccgtccaacccatcatgacaatttgatgctcgccatctttagctcgcttcaaatattcgccccattcatagctgacaattttggccttaacaccaatttttccccagtcagcctggaccatttcagccatacgacgggcattcgggttgtatggacgctgtaccggcattgcccacagatcaatagtaaaaccacttcccatccctgcttcttttaggagctgtttcgctttttctggatcgtactgataatctttaagatcattgtcgtaaccccacatggttggtgggatcagatttttggctttctgaccagcgccctgataaaccgcttcaacgatagcatctttattgactgccatcgtcaacgcttgacgaactttgacgttatccaatggctttttaatgacattgaaagcgacataaccgacattcagacccggctgttccagcaaaacgatatctttatcctgtttcatgcgggcaatatccgccggatttggatatggcatgatctgacattcgtttttctgtaattttgcataacgaacggatgcatcaggagtaatagagaaaactagccggtcaactttggctttatctccccaatattctttgaaggctttatacagaatgcgagaatctttctgatattgcaccaactggaacggtcctgtaccaattggattcagatcgactttctccggtgtaccggctttcatcatcttatctgcatattctgctgacataatagaggcgaaatccatgcctaagtcagccaggaatggggcttccgggcggctcaattcaatccggacagtataatcgtctactttttcaaccttattgatcatctcactcatacccatgccaatgaaatattcatagctgccgcctgacaccttgtggtatgggtgatttgcatctttttgccgcatgaaagtgtagatcacatcatcagcattaaattctcggcttggtttgaagtctttgctatcgtgccacttaacacctttgcgcagatgaaaagtgtaaactttaccatcatcgctaatatcccatctttcagccaagctcgggataatttcagttgtacctgttttgaactcaaccaaacggttatacagtggtctggagctggcatcataagttgtgccagcggtgaacaattgtggattaaagccttccggtgagccttcggagcagtaaaccaatgtttttgcctgaacgctggcggttacggccaatgcaactaagctgacccctagcttcaataacttcgctcttttagagaaagttgtcattttcttgcactccatttgtgatgttgttatgtacagccagaatccgcacttcctgtcagaaactgcgctgtctagattttgtttattattttcagcttatcaattaaacaactgttgtctcttgcgtcaataagatctcaacagatgtcataaacaacaggaaaacacaaaggaaactaataattaacatagttagcacaaaaacatgacaatgcgcacattttatagacaaaaagaccataaaaagctcatggatgcaggattaaccactgttaacctgtgcgcaaaatttgtggctgtttgattaattagtaaacgattatttcagagaaaaagatgataactggcataaaatgctgtgtgccgaataaagtcggcacctgaaaaataagttaaataagtataacattaataatataaataaatacaaaaacccgttactcgtttatctacttttcatcgcttctggtttcattaataattaactagtaaattaacgaccgttgccattatcaggtcgctattaatgctagataggtttcaaatattcacctcattcttcaattctcctaatttcttcataattttgttggataacatctttataccctatttgtcttttttatcttactcacaccaagaatgattaataaagaaactataaccgaagctgcaatcaaactttcaacagaaaacgcgatacgtgaatcaagatattggaaaagaatcgtaaatacaggtatcagtaaaaataataaagagacatgaaggggggtaatggcattaattgccttcagtacgagataaattggaagtaagtgcccgacagcaacaagaatcaacatcggaagaatcatatcaatattcaaactaagagaaacatcggagagtgaaatataacaaaatgaaagtatcaccattaaaatacttctaacagacaatatctcatatgtttgccatttttccttgaataatttcttagaaaaaatagtgtataacaccgttcctacagcaccaattatcacactaacaatgccaataatcctatcctgagttgaggttgatgataatccactatttcctaaaaatacattcactagcatcacacctacaccaatgagaactaaccaagatatgacgacttccaatttttctgtttttgcctcgtttttatcgataaaagatgaaaggaggattgttatcgcaggaccacaagccactgaagctacccccactattgcaggctcaagaaaacgtagcgaaatgattaatcccccccaatttaatagaattgagatattaacaattaacaccaataaggtgttcttgcggaccttcacaattaattgatcaatccctttgaaaatacttatcatcataaataataaagtagatgatataaagcaataaaagataacaatagctgaatttatcgattgcgttaaatacgcaacaaacacatcaaatgctgcactgatgaggcaaaaaataaccccatatattacgccattatatgaagacatatatcacctattattctcttattccaaaaattaaatttccgatattttattccttttgttattgcggattcatctttaatatttcctgtcgaacagtcaatcaatgtcatgtttagccgtatcttaccttctttttctaacgtattaacgatatgcaaaaatatcctgtctttatgcctactgataaaattttgatattcacgcttcgaaaatactcgattatcgtttattctaaacttattaatttctagtaaaactatgttacctatgtcatttaatttcatatttacattccatttgatgctcatagaatataatattcatacactattcttatgttttttcaaacaagtcatttaatgaatgagatatatttctcagatggataaattaaatatcatggatagtaattaaatgttattttttactatgatattattagtctatacctatggatttcaagatgcatcgcggcggcaagggagagaatccccgggagcatagagaactatgtgaccggggtgagcgagtgtagccaacacagaagcaacttgaaagatgacgggtatatacgtaattttcctacaggattactgatacaagagattaaataaatctcaagttaaatagcgtaatttatacaggattatgtggaattacattaaaaaatggaaagtcaatggaaatgttatctactgaaaaaaatgcttaaaagaaacgaacaatcaaatattatcagcccattcaacattgctgcacgagaattcaccatcatttactgtccaaggtgaaacctctcgttgtgaccaaattattcaaaaaggtgatcacgcgctaatagggataagcccctttaactcgcgtttttcaaaagactatgtagtggaccttattcagtggtcaagtcattatttccgacaagtcgacatattattaccttgtgaacgtgaagcttcacgccttttagtcgctagtggaattgataatgttaaagctatcaaaaaaacacatcgcgaaattagacgtcatttacgtaaccttgattatgttatttccacagcaacattgaaaagtaagcaaatcagagtcatccaatttagtgacttttcactaaaccatgactaccaatctcttaaaacacaagttgaaaacgcgtttaatgaatcagaatcttttaaaaaaagctgtcttgatatgtcctttcaagccataaaagggcgactaaaaggtactgggcaatactttggtcaaattgacctacaattagtatataaagcgttgccatatattttcgctgaaattcctttttacctcaatacccctcgattacttggggtaaagtattctacgttactttatcaccgcccttggtcaatcggaaaagggttatttaacggtagttatcctatacaagtagcagataaacaaagttacggaatcgtcactcaattataaaacacaaacagtctgatgaaatagtcactgcgtttaaagttaatacgctcttagtaccaaatatctttagaaaggaagcaaaataatggctaaattaagctctttcaacattcacgatcccaaattcataaaaaatccttacgatttttacgacattttgcataaacaagatttagtttattttgaacaatcccaaaatagctattttattggcaaatatgaggatgttgacgctattttaaaatcctcaattttcaatactaagccattaactgcacttgccgaaccggttatgggggatcgcgttcttgctcaaatggaaggtgaagagcatgcgtgtaaacgaaaattcataatgcaaggactttcaagagattattttaatcgctactacgaacccatgattcgaaagattactgaagatctcttacaaccttatatggaaaaaggaaatatagatattgttaatgactttggccgcgattatgccgtattagtgacattaagtattctcggactgccaagtgataactatcgtgatatagctgaatggcacaagggtatcgccagttttattacccagtttgaccaaacagaactagaaaaaatgcacagtcttgaatgtagtcagaaattaattcgcttactaaagcctataatagatcagagacggcgtaatcccagtaaggacattatatctatattctgtcaagatacagcgatgtccatgagtgaaattacagcactgtgtttaaacattctattagcggctacagaacctgctgacaagatattagcaatgatgcttaatcacttaatatctaatccgagtatgcttgatgtagttctcaaagatcgcagcttagttcgagatgcatttgaagaaactttacgtctgacatcccccgtacaactcattccaagagaggcgagtgaagacgtcactatttctggtatcgatatacctaaaggcgctgtagtattttgtatgattggcgcagctaatcgtgatccatcggtttttcacaaaccaaatgaatttgatctatatcgaagaaaaaataccacttctccacagaaagcaaatcgaaaaagacatttagcttttggtgcaggtactcatgcctgtgctgcggctgcattttcactcagtcagttggaagtttcatccaatattattttggatctcctgcataatttacgttttgctgatcactatcattatcaagaaacaggcgtgtatacacgaggaccttctaaactccttttgagttttgatccaatagcatcttctgctatcaaggaatagtcgcctttatctgaaaatcaccgtagagacgttgaattttcactactgttaacgaatgaagcacaaaagaaaaaaccccgctcaaaaagcggggttctctaaattctggtcggcgagagaggattcgaacctccgacccactggtcccaaaccagttgcgctaccaagctgcgctactcgccgaaaacgagccgaatcttactgcgctcgctacaggccgtcaatacctttttgataaccagagattagttgctgataaaaacaactgaaagccagtgatgtcgcactttctcacagatttcacatcacgcttaaattgacttgaatatcttggctgacgcatcagataccaagctgatcgaataaatcatcagcatcctttgcctgacgaatgtcttcaccacgatcactcttagccaaagtttcggcagtcaatttattaggtgctcgcatttcaaacggtaatgctttttccttcgcaactttagtcaaggtgatacgctccagatcagataggttaaccccataccaaccaaaacctcggtaaaatcaatgccaagggcattaagttccggctatcgcatttcacaacagccggaattgactatttcaggtcattattgcagtaacgaaatatctgccactctcaggaacaagtcacgcaactcacttaacaaagttaagcgatttactcgcacctgtaagtcttcatccatcaccatcacattgtcaaagaaagcatcaacaacttcacgcaaagatgccaactcaaccaacgcttcctgatagtgcccttcggcaaacaaaggcgccagcttatcctgtaaaactatcagatgcgttgccagtttcacctcttctggcgctttcaacgtagaaacatctactttctcgttcaatgtctcttcagacttcgccagaatgttagaaacgcgcttattcgccgcggctaacgctgcggcttcatccagtgtacggaagtgggtcaccgctttaacacgagcatcgaaatcagcaggctgcgttggacgacgtgctaataccgcttgaatggtatcgacgcggtagccctgctcctgataccaagcacggaaacggccaagcataaattccaccacatcatccgtaaccttggcatttgtcagcttatcaccatacaggcgaactgcttcttctgtcagtgtctgcaaatccagtggcaattttttctcaacgataatacgtagagcacccaacgcagcacgacgcagcgcaaacggatctttatcgcctctcggatgctgaccaataccaaaaatacccgccagagtatccattttgtcagcgatcgctaacgcacaagaaacgcctgtagaaggcagttcatcccccgcaaaacgcggttgatactgctcattcaatgccagagcaacatcctctgcttcaccgtcatgacgggcgtaatgcattcccatcacaccttgtgtatcggtgaactcaaataccatgttggtcatcaagtcacatttggacaacaaacccgcacgggtagcatgattcacatcagcgccaattttctctgcaatccaaccggccaacgcctgaatacgatccgttttatcacgcaaagtaccaagttgtttctggaacaaaaccgtctccagacgaggtaaattatcttccagacgctgtttacgatccgtcttaaagaaaaattctgcgtcggccaaacgtggacgaaccaccttctcgttaccgtcaatgatttgttgtggatcagaagagtcaatgttggcaacaaagataaagtttgccatcaatttgcccgcattgtcgtaaaccgggaagtatttctggtcacctttcatggtgtaaaccaatgcttcggctggcacttcaaggaatttctcttcaaatttcgctgtcagcacaaccggccattcaaccaatgaagtcacctcttccagtaaactgtcactgatatcagcaacgccgcctagcttaatcgccgcctgttctacatcctgcttaatgagtaccttacgggttgtataatctgcaagcactctaccacgttgctgcaaaatctctggatactgctctgcattatcaatcgcaaattcagattcacccataaagcggtgaccacgaatgacacgtgcggatttaatacccagaatttcgccttcaatcagttcatcaccaaacaacatggtaacggtatgaactgggcgagcaaactgagtctctttatcgctccaacgcatcaatttaggaattggcaacttatttagtgcactgttaaccatagccgccagcaactctttgacactacggcctttaaccagcgcacgatacaacagccattcgcctttatctgtcactaaacgttcagcctgagcagccgtgataccacaaccgcgagcccaaccttcagccgcttttgtcggtttaccctcagtatcaaatgcctgagcaatcgctggaccgcgtttttcgacttcacgatcagcttgcgcctcatccagattagcaacttttagtgccagacgacgcggcgtggcaaaccaactgatttcaccatacgctaaattcgcgttatccaactccgccgcaaaattagcagcaaatgcttcagctaatgaacgaagagccttcggcggcaactcttctgtgccgatttccaccaggaaagtctgttgagtcatgacagcctcttagttctgattcttgttacacatagggaagcctaacgcctcgcgggaggcataatatgcttcggcaacagctttggtcagggtgcgaatacgcaggatataacgctggcgttcagtcaccgagatagctttacgggcatccagcaagttgaatgtatggcccgctttgagaatacgttcataagctggcaacggtagcggcgtttctaatgccagcaggtcctgagcctctttttcatattgttcgaagcaggtaaacaggaaatcaacatctgcatgttcaaaattataagtggattgttccacttcattttgatgataaatatcgccataggtggttttgcccagcgggccatcacaccaaaccagatcataaacactgtctacgccttggatatacattgccagacgctcaagaccgtaagtgatttcacccgtgacaggtttacactcaagaccacctacctgttggaagtaagtaaactgagtcacttccatcccgttaagccacacttcccaacccaatccccaagcgcctaacgttgggttttcccagttatcttcaacaaaacggatgtcatgaaccgtcgggtctaaccctagcgccttcagagaatccagatacaattcctgaatattgtctggggatggtttaataatgacctgaaactgatagtaatgctgtaaacggttagggttttcaccataacggccatcggtcggacggcgagaaggttgtacataagcagcagcaattggctccgggccaagtgcacgcaggcaagttatgggatgagaagtacccgcgccaacttccatgtccagtggttggacaatggtgcagccctggcgcgcccaataatcctgtaatgtcaggatcagcccctgaaaggtcttggtatcaaacttttgcatgttggatccgcacgcgatacatatgaatttgaaaggaagtaggccagtataccctttgactttaagatatacagcactgaattcgctcttaatttcgccttgaaataaaaaaatctcaatttggttattttacttgtatatctatacagttaaggtactgtcaatgaccaaccactcatactgaaagtaacgactattggaattaacacgtatggaattaacacgctgccattgggttacctctgatcctcaatatctggcttatcacgacaatgaatgggggaaaccgctacaagatagccaaaagttgtttgaaatgatttgtctggaagggcaacaatctgggctatcatggctgactattctgaaaaaacgcgaaggctatcgtaaatgttttcatcagtttgacccggtaaaaattgccgtcatggatgaaaatgatgtggcacggctgatgcttgatcccgctattgtccgcaatcgcgccaaaattaacgctattatcaacaatgcgcgggcatatcttaaaatgcaacaacagggtgaagaattcagcacctttatctggcgttttgttgataacaaaccgattattaatcagtggaaaaccatcacagaggtgccgataaaaacagatctttcagatgagttatcacaagcactgaaaaaaagggggtttaaatttatcggcagtaccacttgctatgcatttatgcaggcaactggcttggtcaatgaccatataactgactgtttatgtagaaaataaattcagtgaattacaatagtctcaagattaacaccaataataaaactggatattaaccaaacatttagctctttattttaaatgttaaattaaatgccatattaaataattaatagtcataattttccagattgcacctcgataatacgaagggtatggtgttatttcttctactttaaataacacaccgacaacgaacacggctatgattttttctcaattcggtaacaagtttacacaagacgcaggtataacccgcctgatgaatgaccttaatcaagggttgcggacacctggtgcaattatgctgggtggtggtaatccggcacatatcccggaaatggatgactattttcagcaattactgacagagatggtcgcaagcggccaactcacggaaacactatgcaactatgatggccctcagggtaaagatacgctaattcgagcattggcagagatgctgcgcgaaaaacttggctgggaaattggtacacaaaatattgccttgaccaatggcagccaaagtgcgttcttttatctatttaacctgctagctgggcgcggagaagatggctctgtccgcaaagtgctgtttccactagcaccggaatatattggttattctgactcagggctggatgaaggcttatttgttgccaataaacccaatattgaattcttgccagaaggccaattcaaatatcatgttgattttgaccatctcaatattaccgaagatattggcctgatctgtgtttctcgcccaaccaacccaacgggtaacgttatcactgatgaagagttacaacggctagattatctggctcaacaacaccagattccattactcattgataatgcttatggcgtgccattcccgggtattatttttagcgaagctacaccattgtggaaccctaatactattctgtgcatgagcctatccaaattagggctgcccggttcacgctgcggaatcattatcgctaacgataaaatcatcaatgccgtcagtaacatgaatggtatcatcagccttgcgccgggcggtgtcggccccgcaatggcattggaaatgatccgtcgcaatgacctgcttcgtttgtcacaggaaattatccgcccgttctatcaacaacgggttcaagacgtgattcagattatccgtcgttatctaccggcggaactttgccttatccataaaccagaaggtgccatttttttgtggctgtggtttaaaaatctgccgataaccacagaaacgctttatcaaagactgaaaaaacgtggtgtgttaatggttccaggtcactatttcttccccggattggaacaagactggccgcatgctcatgaatgcatgcgtatgaattatgttcctgatccggaaagtattgccaaagggattgcgattttggcagaagaaattgagcgggcacatcagcaagcagcctgaaatcaatatagtaattaaatcaatatagtaaaaaagctcctgcccggaaatgcaggagcaaaatgataacgaggactttacataattattttcagaatttgtagaatgctttgtgcataaagaagagaaagaaacacgccttgtttgcccactctccttaagcagcctctattcaatcagaaatttctaaatccaatgcctcgaataggcgtgtttttgtgcgtttactgatggctaatgcaagagtacattacgcattaatgagacttgcagccgatatgccaaactgcttattcagtttacgaatcattggtagtgttagaagcaccaccaatacctaatccaacttcatatattttacagtttccaatccacaatccaaatgcagccgctaatgccaacatactcactgtaagagcaatatcactcataacccgtttcctttagcaaaagttaaaaaaccgggagattaattctgtttacttactgattctgtcagaaattaaatagccatgatgcagttaatcacacaaattataaggatttatcaccccccaaaggagcacaacactcacgataacgatgtgaccggggtgagcaagtgccattaacaaagaagcaacttgaaagatgacgggtatagactatccaaatcatcatgatgacgtacattattttttattaattaaaaaacagaaaaaaatcctgttacataaaaaattcacgactttttgatatcagggctatggtcaatgttgtataacctgattatagtgattgatgtcaaaactcttcatcaagagatttgggaaaataaaaattacccaacaagcttatgcaagagcaaactatttcagcggcttagccatacgagatcgatagaaccaatgaagaataataaattaattctattttgcgtcacattaggatggttgttaattagcgggtgcaccagcatcatgacacattcagggcctagccgcggttattatcccggagctaaagctaacattgaaatgttaaaagacaaagatacgggttgggtaatgaaaccattactcgcgattgatctgcctttttctgcgctattagatactctcttattaccttatgactatataaaatctgacgaagatcaatcaacaagttcaccaaaagagcgaattgaaaaaatagaaaaagcacagcgtcaaaccaaaaccaattaattgataatccgttccggtttatttattgccaccagcggagagtgaactgacggcaaatatatttatttcaatccggtttccaccaggaaaatttgcatataaccatcgacttcacgcataaatgcaatatgatgactatccggtgaaatcaccaccgcatccgcagcaggcgctttttctgtacgctttgtcaaacgttgcatctgaccattttgtacatcgcacagcatcacactgttatcacaaataaaagcaacaaactgaccgctattttcccaactaaaagcagattgaatgccacagtaactctgagttatttgacggagctcgccaccatttggcgatattgtccacaattgcacaataccattatcatctttcattagaaaaccaatctgttcaccattcggtgaaacacgcaaccagtgacgcgggttattcacgactcccggccagcgtttgtggctggtcaatgtcaaacgacgctgcattacactggcaggcggcgcaggtaacgttgtttccgtaccttgcagcggtttttcccctgctatcgcataatcagcatcctgttcaggtaaatcaacgatatagacttccggtactttttcccctgttgcagaaatagtatcgccaataaatgccaatgcccaacgctgccaattaccatccgctttacgatatcctgcttgacctacccaacactcttcataggcgcggttaatatcatcactgcccggctccggccggaaagtagtagtactaaccacaacggagaaatagctaccatcatattcacggggatggtgcttaggtggttcaactggtttgaggggcacagccacggcgatattgcgcaaatccagcgctggatcaagcttatgcataacatggtcgttataagtaaaacttagacggctaccatccgggctgaatacatgaacgtgactgcctccgcgcaacgctcccggggtataaggggcagtaatatccattgcatccagcgtaaccgcttttcccgaagaatcctcactgacaatgacgccccgacggtgatgaaagtcatagtgccattgctcatctgggcattctggcccatgaataaacgcatatcggacaggttctgttgggctgactgtcaccacgccaacatgagcgccctcctttgcctgatagataatttctgtttttccactctgcacatgaattttttctatcgttaaaccagtaaaagaagcaccgttgggacgaacatcataagctaaccattggctgtctggtgtccagacattaatattagtaagctggtggctacggttatctaacgtgatttgccgttcctgaaaggccattttattatccttgcatcaggttttttcggataaataatattaatccgaaatggatggaactaaaaaatttcagtcgagactttaccacttcgacattactcttacttttttatgctacgtacatttcatttctatgttactaagtgttctttatatcatcggtattactgctgaagcgatgaccggggctttagctgcgggccgccgtaaaatggatatgttcggcgtgattattattgcttccgtaactgcgattggcggtggctccgttcgagatatactactagggcattatcccctcggttgggttaagcatcctgaatatatcgtcaccgttgcctgtgccgccgtaatcaccacttgggttgcgccgatgatgaaacatttgcgccgcctgtttctgatccttgatgccattggcttgattgtcttctccattcttggcgcacagattgcgctggagatgaaccatggccctatcattgcttccattgcggcggttattaccggtgttttcggtggtgtgttacgcgatatgttgtgtaacaccattccgttggttttccagaaagagatctatgcgggtgtctcctttaccgccgcttggttatatattggcttacagcacacgccgttaccgcaaaacggcattgttctgattaccctgatcgccggtctgacagcaagattggttgctattcgctaccgtcttggattaccggtctttaattacgaacactccgatcactgagccatatcagcggggttaactacgaccccgttttcccggtcaaaacccgttatccctgccactgacagtttctctgcaatcgctttaatctgcgcgtcactgacaaaatcagacaactttttcaactgcccgacagtaagctgttgttttaattgtgccgcggctaatttctgctccagttgctgccagtgataaacattatcagacagcttatccatataaggcactccaatccctttcatccagtaggaaaaaggctgattttttgccttgctgaattgcgaataaatagcctgtgcccgtttatctccgattcctggtaaggccgcaatttgttgagctgaaagcgctaaccaaccggttaaatcagtgactaacttccgttcggtcaacattgcccaactaccgctactgacacctgtcatttgcagattttcaccaagccatttcaatcgtgcattaaattgttgttcacaacccaccgttaacgtcaaacaacttagtgcatgataatgctgcttatccggtggctgaatatcctgacgctctttgatccgccataccacctgagctaatttcgggataccatggcctgccaatgtcagcgtcacccgatcccccggtaatacatccaactgccgccaacgacgaacagaaccaatattgactctgcttatctgccgatcatccagtttcactttatccagcccaagaaccactgagattttgcccgttctgccaatagtaaaattaacttccctgacttgtgtaacctgatggcgtaaagggtgtttccatgccacagcccaactgttagatccagaccgccactggtttcctttaggttcaatttcctgtttcagcacgataccgtctgtagcaaaaagcatgggttgttcaaaatagtgcatccgcagtttctgcacctgctctggttcctctattttatgactgtagcgaagcgccaatggaaaccccatatctgccagtttgcgcaatttactttccatctccgcagggccatccggccagctccagataaacaaacctatttgttttaattctgacgaatggtccttacgcatcatcaaacccgcaacccgattacgagcgccatcactccccaataattgctgtctatgctcctctttatgcagaaagagttctccttgcaataccaaatcaggtggagcattttctatattctgcggaatatcgggaatatatcggctttttgctgtccaatttaccccttcggcaccattgccccggctgattaatgaaacaagtttcccgttctgataaaccaatgttaccgctacaccatcaatctttggctgtaaccagacaggtaatctaccgtgcaaccatcggttaatttcctgcttgtctttcagtttacttaatccggtatgagcaaccggatgaacaagcttattatcgggaaaaacttccacaggaaaatctgaatggggtgcttgtttcagacagaattgccaatgagtcagctccgacattaattgatcataaacctcatcatcgatctcgctgatccctttctgacgatagagctgatcccagtgcgccatctgttgcatcaagctgttagtttcacgttgtaatttgtcctgcgaccattcggggcaattcttttctgtattcgaaacaaaaatttcagccgcaactatcggtgaactgaaaacaatgaacagaattaatatcaataaattaagcatccgttgctccttggctatccatgcataacaacaaaatagaggataaagagatgctgtccaaggcagagataataactttgcgaagcgcttcgaagaataactgcctgaaatcccaaggtagcgggctttttcatacactacacaaagcagatatttatggtgaaagcctgatgtatttaatatttgattcagggctgccatcaacgattcccgccccagaggttctcatcgaagacagaggtttaataaccgataaacttatcacatacgataagttcaagggtcgatattaaatatgccacccaaaattcaggctcgtatcctaaaaaggatctcagaccgctgacaaacctcattgaaaataatggggtctgttcttttcataatgaatcctaatacaacccattttcctcattgacccgattcaatcgcccgtcagggggttagacactgtatttgcattttctgcaacccgcgaaaatgggcgagagcataaaaaactgtggggcatttatgtggcaaggaaaactgcctattttccgttcagttattgggtgataaataataaatcgctttgcaatttactataatttgctctataaattacagtagtctacattgtgaaatattcagaaattgcgaggtgacaacatggctgaaactatcgaccacggcaccctatcacatctagtggaggccggagccgttaaaggagcgcacatcgtaggccagccaggtggctgggccgtgatggtacgctatggaatgcacgagcgaccactggccgcacagcgcagccgcaatgtgcggctattccgcaagttcgaaacgctggtttcctaccttaaaaaaattggcattgcccgcttcgacgtggattcatcaaactacgcccccgctccccccaatacctcaacgcgcaggccagatcgtgccgaagcgctcaagcgtacccacgaggctgctgcatatgatgcgtggtttcgtgagcaggtgcagcaagccatagatgaacccggaccgggtatccctcacactgatgtcaaggccaaatttgccgccaaacgtgaagccttgcgtaaacgcattgtacagggtcgcgcatgaaaatcatttggcgaaagatcgcggaagcagatcgagaacgtatctttgattacatcgcacaaaacaaccccagcgccgcgcttgagcttgacgcagactttgatgctaaaatcgaactcgctgcgcagcggcctaaactgtaccgccccggccgtgtgcacggtacccgtgaaatcgtcgtgcggcctaattatgtgattgtctatcgcatcaaggatgaaagtggtacggtagttgtgctgcgcgtgctccatgcggcccagcaatggcccctggccaagtcaagcgagagcgtttctggtgggaaagtctgaggaagagtagcacttgaagaagatgtgacgattaatgctttcgtgaatcaagcgctagaaaatgaagtcagtaaacatcatgtagggccttaatagccccatcggattaatgacaaaagtgctaaccatcaggggccggtctttgatctaatagaggtactggaaaatcgatacctcgatatactaaaaacccccacacgacaacaatatgattgacatcaacagaaccccactttttaaatggggttcgtcagcaatctggatcttggtctcgcttataaacgaatgaaagaggttataaaatgagcaacttaaaatccctaaaatccaaagcattagctaactcagatgtaaaagctgagtatgatgcgctagagacagaattcgagctaattaatactttattacgcatgcggcatgctgctggtctaacgcaaaaccaagttgcacagcgtatgggaacaaaagaggcgaatatttacaggcttgaaaaaggaaacggaaacccaacacttaagacactattgaactacgccagagcttgcaattgtgaattacattttggcttcaaaacaacttaatccaaacgatatagaaaagtaccttcgggtgtgcttcatcagcttacgttcgcctttaccgatgaggatcgtctcaacagcacaaatgagcatcaatttgctcgctccattaggttttgcaatgattatcagttagcctgggagaaacctcgccattcgaactaaagcacacggtgaatacgattagttaatctattaagtattaatttattattgtgaaccattaaccaaggctgagccataatacctcggttcagcctgttgagtattcactttaaatctcatcacagccgctctctgttattactaacattaactttcaaataaagattaaaaggcaatgactttacgaaatagtttgggacgtaaatcctaaaaacccaaaaataactgacattttcataaacaggctagagcggatattacaacaaacccctagtgatttttcttccttgctttacagttaatacttagcatattaagttacatatttacgtattaataagagtagccataaagatgtacatcccccctaaattctgtatctcaagtctcataatttcaacccttaccacttatagataaaaaaataatctgaaatcaactaccaaaaaattaatttagcattaatctgaagttatcagccgataactatttcctattatctttttttaaaaataattgctaatcttatttatgtcttcgtagcaatagaaattcagcttaacccgcaagggataggttttatggcataggttccctgtaggtaaaggtaaatccgatataaccttaagttaggagagtaatatgaatcaagacgatttctcctcaaacatgagttccagcaatactcttacatgaacgaaaccgtgtaataacaacctgcacgggtgacccgatgcagagaataatcatctgaaaaaggagggcccttaaaaggccaatacaatctggccgggacagggttatcacaaagaatgaaaatttttaatatggcaaccggggagctatccccatcagagtattatcaacctaatcctgctgcaccctcttggaacccaacgtgggcagtcaaagctctcgggcaaccggtgataaatgggaaagacaacaggggtaagccaattcgttacccagaatcacgtaccagtcccttattgaatgtctttccgccagtaaaaaatcgtaattttccaaagccgagagtagacgatatgacgctggaacaaggcaggttctggataaatgcacaaaacagcatcttcaaggtcccacgtgtggtcacaggcacgtatatctgtcagatggttgccaaacgtaaagataaatctccagggaaagccacagtgaccctctatacggatgctaacgttgtaaattatatactctacaggttcaagggagacaaaaacgttatggaatctagcgtgaacgacctgatttacacagcaaactgccgagggaccggattttcatgggagcgtaaacccgaagagaaatttgaattggaaagtaagtgggaaaacgcggcactgacaattaaaatgcaagacacttgcgattggatttatgatgttgctttctggacgccaccaagcaacaatccaaatggtcagtttaaagacccagccatcctgagacctaatagctaacctggagaagccagatccctgtaataacccagataacctatccggaatgagaaggccggtagcagcaataaataaaaatctttaacagaacaaccggggagtaatccccggttgagcactcaatgaatacagttgacatcctccccgccacaaagagggtgtcgcaaaagctcatgttatccattaaaatctgcgctcttcctttaggcgcagatcttttatgaccttattcactcgaaaactggaaccgtctgcttacactaaacgtcatagcgtataacttatcaagggccgttgccctgatattatgggctatttttagcttgtctgggttgtcagttccaataacaggcaataaatctctgtgggtttattgtcaatgctggccttttgcgacaccctctaatttgaaatattagcttacctgccctctgttattaccaaattaagttactcgttcacgtaataatagtcataaagatgtatatccccgctaaatccctctgcctaaatctcattattaccactcttgtgatctatctgtggaaaataatctaaaaaccactaccaacaatcaggtgtagcattaacctaaggttatcagccgataacttttttctattagatttttacttaaataatgtctaatattattcatgtcagtaaaaattcagtttaacccgcaagggacaagtcttatggcataggttcccctgtgggtaaaaggtaaatccaatatataccctatggatttcaagatgcatcgctattctgcacgctaccctctgagtttttgggatacaaatagccaaggttacattggccgagatggttttccattccggtttcaactcaataaataatagtcatattgaattatctcatgtgtatcagccagcaatagctgataaatctagcggcaatagtaatagcagaaaatggcaggcaaatatacctaaaggctcggaaagcaacataaagtaatgcggacagtcagtgcaaagtggtatttgacttgggtttcctccgatcaagaggaagtgaataagagccggagtccagaggctaattgaacaaaacctgtcattaagacagataacctgtagtgacgacctgcacgggtacccgatgcagaaaataataaccggaaaaaggggaatctctgaaaggccgatgtcatttggccgggacgggattacagcaataaatgaaaatttctcacgtaacaactggggaactatccccatctgaatatcccatgaatgcgggtaacacattcatcaacagaatgaagcaggatattggccggataacggcacattaccgccagtggccggtatggatgatgtgcgtgtctgtaggggcgctcttttccacctcggtatttgccgctgctacacccaattggaacccaagctgggcaatcaaagctctcgggaatccggtgataaatgggcaagacaacaacggtaagccaattcgttacccagaagagggtaccagtaccttattgaatgtctttccgacagtaagaaatcataattttccaaaaccgataggaaaagagatgatgctaaaagacggcatgttctgggttagagcacaatacagaatcttcaaggtgccacatgtggttacaggtaagtatacctgtaagatggttgccaaacgtaaagatagatctccaggggaagccacagtgaccctctatacggatgctatcgttgtcaatccagacatctactggttcaagggagacaaaaacgttatggaatctaacgtgaacgacctgacttacacagtaaactgcctagggaccggattttcatgggagcgtaaacccgaagagaaatttgaattggaaagtaagtgggaaaacggggtaccgtcaattgaaatgcaagacacctgcaattggattcataatgttgctttctggacaccaccagacaacaatccgaataataggtttaaagacccagccatccagaaacctactagtacgggcagtgctaacctagcgaagccagatccctgtgataacccagataatatatccggggtgagaaaggcagatagccgcaataaataaaaatcgttaatagaacaaccggggagtaatccccggttgagcactcgaagtacattggaaatagataacccgtttccataacggtcagtttttacgtaaaccatttaaatattaccattcgaatattaattcctccagacctgcctcactcacgcttaaccctattatttatttactcgttcgcgttactctttcaatactttcattcgtatgacatctcaatgtatgtgatattttctttaccggaatacatccaccaaattatcaaccaatcacttttttctactatctttctatgcaaataacaggtaatgttattcagtgacaatataaatccggtttaactcacaagagtaggttttaccttatcggtagaaataccgccagtaaaaactgacggcagtaagagctaaaatccaatgaggtaacgtgtagtgacagcttgcacgggtacccggatacagaaaataataatcggaaaaaggagaatctctgaaaggtcgatataatttaaccgggaggggattacagcaataaatgaaaacttctaaagaatattatgttcatacgtatacacaacctagtcgacctcaaatcacgagtaaccctcaaatcatagactgggttccagagaaagccattttagctctcggaaccccgaagatatatggaaaagagaataacgataaattggttcgttatccagaaagtgggacaagtaccttagtctttcctaaaggtgatccacatttcgattttccagggacacgtttacctgataccgcagtgttaaaagatatgatgttctggattaaaacgaaaaaccgaatcttcattgttccacatgttgttacaggaaagtacacttgtgagataatagcctcccgcaaagatggccagccaggaaaggccaccataacactttatacggatgcaatcgttgaaaataatgagccccaatggttcaaaggggacagtaacgtaatggagtctaagctactcgatctgtgttacgaagtatcttgcgaaggaacgggtttttcatggcagcgaaaacctgaagagcaagttcaattcgaaaataactgggaaaatggggtgccgttaattataatgcaagacagccaagatatgcaaaatgtgatctatagccttgtgctctggtctgcacccgttgatttaaatcccaattttaaagatcctgccattcttttacccaatgaataaaataataaccagcagaaactaagagcctatctcaataggcgtaattgttgcagacagtttgaacacggacagcgcggaaaaaccggagcgtacacgtagtacgtgaggattttgagcactgcccaggttcgctctttatggcaaagaagggcaaataaaatagctctattgggataggcagtaagagtaaaggtcatttatctggaatgaagcgatagcaacacaatgaaaatctttaaccagacaaccggggaacaatccccggttgaatatccaatgaatacggataatatactgagttatcattcaccttgttttttatcaatctgaaatatcacaatattcaattcaagttattatactgattttccaataaaaattaaaaaagcgataacttctcacttcaaatgagaagtaaataaccaattactgtaactgttaatatttacactaaccatttaatatcatgacgtcgggtttaactcttctgagtcacatcattcacgttcaatcacattatccgcttaccttttcatgttatcctttcaatactttcattcgtataacacctcaatttatgtgatattttctttactggaatacatccacaaaattataaactgatcgtgtttttctattatctttttattcaaataacaggtaatgttaccccgtggcaatataaatctagcttaactcgcgataaaccgattttatcttataggtaaaagcaaacccaatattaaccttatttaggagagccaatatgaaccaaaatgaccatctctcatcaaacatggctaccggtgatcgttttatccagcaaaacctaaaatcaggcagagaaagtaactctggtggcaatacctccatcgtctctattgaattggcagacgattcgtttccgcaaaataacatttctattaaattgaaaaccgccatgttattgcaaaatggcagagtgatcacttggggaaaaaaacggtttgatacacaggaagccccgccaccaattgccgaatttgccgaattgcaaggtatcgtcagcctaagcgcaacacactctgcatttgcagccttgcaagcagatggcagcgtgtctatctggggtccattaatcaatggcctactccccttagaatcagtggataagatgaagaatattgtcagtgtgagtgcaattccaataagagatgttttcacgggcctacgggcggacggcagcatagcctcttggggagcagtggattttttaaacacggctctgccaagaatgtgtggattatcgctacacaatatcatcagcctaagcgcaacagagcaatcttttgccgccttacgggcagatggcagcgtcgtctcctggggattggattttttgccaaccccacccgaaattgccgcattaaaggatattgtcagcctaagttcaacaaataatactttcgtggccttacgagcgaacggcagcgttgtctcttggggtgtggaaattatcccgccagaaatcgccaaattacaagatatcgttagcataactaccaattataattatgccgccgccctacgggcagaccacagcgtcgtttcctggtggggaatagtggttccacccgaaattgccgcattaaaggatattgtcagtttaagtgccacaccgtatgcctttgccgccttgcgagccgaccgcagtgtggttgcctggggagatatagacattggcggaacattaccacttaagattgctcaactgaacgatatcgtcagcctgagtgcagcagattgtgctttcgcagctctgcgggcagatggcagcgtcgttgcctggggacaaccaagtcgcggtggttatgtgccaccggaaattgccaagttgaaggatatcgttagcctgagcgcatcaaactctgcatttgcagccttgcgagcagatggccgcagggcaggttggggaggaggagataccaaagcacatggtgaatacgattaatcagtaaatgtgttttttagcaggagagacgctggcctgaaaattgagttaatcctcataatctcttcacctgttatgaacgggttaacacactgcgttgaccgccagcaaatcaaataccgcaatacaggtgcttacaccctttaagcagaaacccagtttgacggggaagaaataggttttgcggcgcagaattcctacaaataaatccgatacagccttatcaggagagcaatatgaatcaacataacgagttctcattcagcacagagaccaaagacacttttatcaaacaacgatctggaagcaaagctatcagctatgatagcaatggcgtcatagactctaataactctggaaccgccatattattacaaaatggtcatatcgttgcctggggggatgcgcgctacggtggagaactcccacctgagattgctcaactgaacgatattgtcagtttaagtgcaacatatgctgctttcgccgccctgcgagccgaccgcagcgtcgttgcttgggggagtgcgggctacggtggcaaaatcccacctgaaattgctgaactgaacgatattgtcagtttaagttcaacatatgctgctttcgccgccttgcgagccgaccgtagcgtcgttacttgggggagtgcgggctacggtggcgaactcccacctgatattactcaactgaacgatattgtcagtttaagttcagcatatgctgctttcgccgccttgcgagccgaccgtagcgtcgttacttggggggatgcggactacggtggcgaactcccacctgatattactcaactgaacaatattgtcagtttaagttcagcatataatagtttcgtcgcctttcgagccgaccgcagcattattacttggaccagtagtcatagttatgtcccatcaagaaccgctcagctgaatgatattgtcagtttaagtataaatgataatgcttttgctgccctacgggcaaaccgcagcgttgttgcctggggagggggttatagcaattatgtcccatcagatattgctcagctgaatgatattgtcagtttaagtacaaatgatgatgctttcgctgccctacgggcaaaccgcagcgttgttgtttggggaaggagtgataggaatgatgtcccatcagaaattgctcggctgaatgatattgtcagcctaagttcgacaaattctgctttctcggccttacgggcaaaccgtagtgtcgttgcttggggagatctagataatggtggcatactcccactcgatgttgctcaactgaacgatatcgtcggcctgagtgcaacaaattctgctttcgcggccctgcgggcggaccgtagtgtcgttgcctgggggaagccaagtaccggggggtttgttccacccgaaatcgctaaattgcaggatattgtcagcgtagactcatcggggagcgcctttacggctttgcgaacaaatggcaaacgagttggctggggaggcggggatattaaagcacatggtgaatacgattaattgccgattaagccatactctttcattgtaacccggtgactgctccccgccgtaaaaaaacagcgaggcttcccacttctcaggccgcaaccgtctttatgacggatttacgctggcctccgtgggcagaaacgacaagtcccgccgcctgtaatgctgttatgcccttgcgctggatgttgatcgccgcattgatatcgcggttatgttcgactcgacagaaagggcattgccagatccgcccgctcatggactgccgccagacgtaatcgggccttgccgcggttagcactgcccttttaagacagtaaaaacgctcaaaataacgcgctttttcatctcaatgcgtcggatattatagtgcttcttaacaattaaaactccttgagaaattagccatcggcggaactcactgtatttcatccatgcctccttttcgaccaagcgatggtgacacataaaacagcaaatacaccatttttgtttcattcaacaacagttgtgataatacatagagcaaaattttaactaaagaagtcaacccttggcgatacaaaatatccattggcaatttttcccctaagaaaatttcggcggaaatgcatcggcaacgcgacatgtgtgaatgggtacgtgtatactgttataagaattttattctgctttatttaattattatccaatcaaccaagataccaccatgatccaaggcacgttatatattgtctctgcgccaagcggagcgggtaaatcaagcctgattcaggctttgttaaagactcaacctctgtatgatactcaggtttctgtttcccataccacacgtgcaatgcgtcccggtgagaatcagggtgaacactatttttttatcaccgaagaagcctttcgccagatgatcgataataatgaatttctggaacacgcccgtgtttttgataattattacggtacatcccggaaagtgattgaagaaacgcttgccagtggggttgatgtttttcttgatatcgattggcaaggagcgcagcagatccgcaaaaaaatgccctctgcccgcagcatttttatcctgccgccgtcaaaagaagagctctgtcgccgtctgcgcggtcgagggcaggatagtgaagatattattgaaaaacgcatggatcaagccgttgcagaaatggttcactataacgagtatgattatttaatcgttaatgatgatttcaatactgcattggccgatctgcacaccatcatccgttcagaacgcctgcatcgggagcgccaggcacaacggcatgatgctttaatcagcaaattattggcagactgaaccaagtttcagtatgatgcccagtcatttctttacctgtggagtcgcacacatatggcacgcgtaactgttcaagacgctgtagaaaaaattggtaaccgttttgacctggtgttggtcgccgctcgtcgagcacgtcaactgcaaacaggtggtaaagatcctctggttgctgaagagaacgataaagtcacggttatcgctctgcgtgaagtggaagagggcctgatcaacggtaaaattctggacgtacgtgagcgccaggaacaacaagagcaggaagccgcagaaatgcaggcggtttccgctatcgcggaaagtcgtcgttaatctacggtaggtctgccttgtatctgttcgaaagcctgaatcagcttgcccaaaaatacctgcccggggctcagattgagctcctcaagcaggcttactctgttgcgcgggatgcccatgaagggcaaacccgtaccagcggtgagccctacattactcatcctgtcgcagttgcctgcattttagccgagatgcgtctcgaccatgaaacgctgatggccgccttgttgcatgatgttattgaagacacgcccgccacctttcaggatatcgcccagcctttcggcccggtggttgccgggttagtcgaaggggtctccaaacttgataagctgaatttccgcgataaaaaagaggcacaagcggaaaatttccgcaaaatggtcatggcaatggtgcaggatatccgcgtcattttgatcaaactggcggaccgtacccacaatatgcgcacgctcggcgcgttacgcccagataagcgccgccgtatcgcccgggaaacgttagagatctacagccccttagcccatcgtttgggtatccatcatctgaaaacagagttagaagagctggggtttgaggcccttcaccctaaccgctaccgggttatcaaagaagtggtaaaagcggcccggggtaaccgtaaggagatgatccagaaaattctgtctgaaatcgcaggcaggctgactgaagccggcattgaatgcaaagtcagcggcagggaaaaacatctctattctatttaccagaaaatgcacctcaaagagcaacgttttcattcaattatggatatctatgcttttcgggtcatcgttaataatgttgatatctgctatcgggttttggggcagatgcacagcctgtataaaccccgcccgggcagagtcaaagattacattgccatccctaaggccaatggctatcaatccctgcacacttccctgattggccctcatggggtgccagtcgaggtccagatccgcaccgaagatatggatcaaatggctgaaatgggcgtcgcggcacactgggcttataaagaacaaggtgaatccggtaccgccgcgcaagttcgtgcgcagcgctggatgcaaagtctgctggaattacagcaaagtgccggtagctcttttgaatttatcgaaagcgttaaatctgatctgtttcctgatgagatttacgtttttaccccaaaagggcgcattgtggaattacccgccggtgccaccccggttgattttgcttacgccgtacataccgatattggtcacgcctgcgttggctcacgggttgatcgccagccatatccattatctcagtctcttaccagcggccaaaccgttgaaattattaccgcgccgggtgcccggccaaatgccgcctggctgaactttgtcgtcagttcaaaagcccgcgctaaaattcgtcaattgttgaaaaacctcaagcgggaagactccattgggctggggcgtcgcctgttaaatcacgcgttgggtagtgggaaaaaactggttgatattccaccggaaagtatcaataaagaattgacgagaatgaaactctcgacaatagacgatctgctggctgaaatcgggcttggcaataccatgagtatcgtcgtcgcccgtaatttgctaggcgcgccgccagaaaataccacaaatacctatcacaacaatggtgcccgtaaattacccatcaaaggcgctgacggtgtgctgattacgtttgccaaatgttgccggcccatccccggtgaccctatcatcgcccatatcagtcccggcaaagggttggttatccaccatgagtcttgccgtaatatccgtggttatcagaaagaacccgaaaaatttatggccgtcgagtgggatcaagagatcaataacgatttcaccgccgaaataaaagtggacatgtttaaccatcaaggggcgctggcaaatctgaccgccgccattaatgcagccaattccaatattcagagtatgaataccgaagagaaagacggccgggtttactgtgcttttatccggctcacgactaaagaccgtattcagttagcgaatattatgcgcaaaattcggatcatgccggatgtgatgcgagtcagtcgtaacagaaactaaaccggatagcccgtgcaaatcagcaggtgaacaatcaacagcgctatccaccgccgacccacaagacaccggcggcggatacggggctgacagcacgtcatcccggttatcaaagaacagaccaatcaatactgaatcaacctcatccagtatgcggtctaaccaaccctcctcacccacaccaaacatcaataccaatccgatagcgataaacaatagcggcaaaatccatgttcggcaccaatacgctaacagcatacggggataccgcgagtagcgaattttgttgcccaataaaaacccacagacggccaacaatatgatcccgataaccagtaccatccgacttatcagcatcccataaggcatcacacacaaaatcgatgaaaactcgcccttcatcatatcccgccaaacagccacatgtgtgatacgactcaggagataaacggaccacaagcccgctgcaaaaaccaagtgcgccaaatgcacatgtgattagcttgtgataatgtccgggagcgcgtcgacttcaccgttttcgttaccgacgcctgacccttctgaggcatgggttcaacgacggccgtaacaattagcatctgccggcgacttccctgcttctcacgaaagaagactttttcacaggcgatcacatcacgtcgctcattgtagatataattcatcacatctgttgcccggcgttctgtcactcggaacacctggctgatttcacttttggtaaatccactccccttcaataatccccaatacgcgactgccatgtacaacggtgtatccttcaaatgagacaaacaggccggcaaccgaaaatccccatgattactttgtttgccggtaatagtctgacctccaggcaaatcggtctggctaccgcttatctgaagcagcattgaatcattaacattgattgtcattttactctccactggtgactaacgggtcaatttgttaccacatgagaaatgaaatagtgcgatttattgagatgaaatacctatggcggctaagccaccatgccatatttaaataccttgccagcgcagcgttatttcatgactagagttgcctccatagacgttttgaactcaccagaaagcttggggtctatcgccttcgtttgccaaagctgcacagaaaacctgttgagagaatgatgagaataatactcgcctatttcgttgccgtgctcatcctttttaatttttttcacggctgacttatcatctacattaaaaaccagcacacttttagggtcagccgctgaaccaaatgttactggctgaccaatctggttgccgcctacaagcttagtctgtatgcctagaactcgcggcaacacttttatcgccaacgcgttatcgaagtccttacccccagtctcatcattagtgtccatcactatacttttaccatcaacaccgagatgcttagtagaaaaattcacaatggctacgcctgtatcgtccttattgggtgtatcgcatacaacacttatcaatagatcaaatatccctaccgttgcccggtgtaactcttttgggaatatcgcgtccgacggctcccggcgaatctctcctaaatcaaaattctcactagactgactttcaaaaatacactctggaggggatatcactgttacagggtctttgatagtcggaagaattggtctggaccaccacataaaatcccctccatcaattaaaatacccacaggtgcattaacattctgggtttcgaattcaactttttcagcggcctttcgctcccatgaaaaatttaccccttgacaagacacatcaaaagaaaggtcacttagttctgcctttgctacactctcatcatcctgattaccagtagttctcgccacgagcgctactggtgatttagaatactttgtccctgtaccatcgatatccaccgccatgttttccttgggaatggctactcctggacgaccatttgtaaatttggcttcaattgagcattcgtaacggcctgaaaccactctcgggactttaaaaatttccccgtgccctgctttgagccggaacttgacctgatccaacgttttactactaccccactgcatagacagtgttggaaacacatcttttaaggtcgctttacccgttgccggataagtgattattccgtcactccactttacctttcgagcaggccccagagcgtcaatggcgcgatcagcattccaatttattgtcgacgcggcgaacagtgtgggagaagaaaagatacccacggataggcatatcatccccacccatatcggcatcgaccaccagcgacaatgaaccaccatccaactcatatcctgttttatcttgttaataaatgtcttattcgtcttcatcggctgcccaaccgggagtaacttcccagttgtcctgttagaaattttcattcgttgatacaccccatcccgaccaaatcacatccgcctttcagagggtcctcttcctaataattatggttttccccattaggttgtcagtgcagaaccacaacacattgcctcatcttaacgacaggtttcgttcaattgcctcattggattccagcgtttatctgccttcgcctttaccggagggggccccaggttaaatgccacctcgcactgcttgtccggtgtactgccccacttcactttcagtaccccgctgggtggcataccactcagatacacttgtccgccctccccgactatcgcggccagatttgtgtctgtatcccctttaagccccgccattgccccaaacggcacgggcttaccgttataggtcaaattcatcagcaactgctgcccaatacgcacggggtaatccaccatcacaaccgcaccactcgtcgggaatacgttcttgctaccctgtgccatgtcagccccttccggcagcgatgacggatctaaactgatactattacggctgtacgtctgggcataaggcacaaccgcatatccccagcgattagtagtcaccgaactggaattcatcacacgaatacctgcaacccccgatgtccgcactaatacagcagcatcaccaatacgcgatgccaaagtaacgccatgctgatgtgcaatcagccctccactaaacccgtagttcacaccacgtcccccccatgaatcgtagttgtatcccaagttggcttgcccaaaggaaccaagatatcccattgacactgacccgctgcgccctctccctttattcgcctgactctgcgatacgttccaagacagactattatcatccagcaccgatccgcctatgcccaactggttattactgcgtcccgtactatcacgggaaaaactatagttagcatacgcattattcagcgccgcataggagccaaacagactcagaggaacgtttacgttcaacgaaatttgccgattttcaggccagtcgccgttaccgcgcatgcgatcaatgctgtaattaagcccccagcccacacggtagaaagaaccattcaatcccatcgatagggtggtgttagttttagagcttccccagtagttatcccgctgaccactgagccacagagaatagttaccgggcaatgactggctcagtcgcatctgccaactactgcgtcgccgctcagacatccaagaagggagttctccccaaacactgtagccttgagtgttcgcatccgaaaaactcaggtaattacgtgtggaatagcggtacgcggttaaatccaccgtcgtgccagtggtcagcatgcttttcgaatatttagcgcggtaagattccccacgcaggatgtcaggcgtattttgtaaccgagtccgggaagtcgtgatatccgcagataacgcccccatcatgcccagagagagcccggttcccagcgccgcggattggtacgattgcgccaccaggccaccaccgtataacgtgacgttaccaggcagaccgtaaatcatcgaggccataccaaacaccggcttacgtatgccgctgccatatccactactgtaataacgcccggcggccacttcgtacttgaattgcccctgccgcaacatcataggcagactggaataagcctgagtgaacccatggtgagtaccatcggcctcagttatcgttacctgcaagtcgcctccgacactgctgcccactaagtctgtgatacgaaatggaccgggtgccacgttggtttgataaatcacactgccattctgcgtcaccgtaatctgagcattggatttagctatcccactgataatcggcgcaaaaccactcagcctgccgggcatcatcgggtcactagtggcaagcccaataccacgataaggaaaaccatcaaatacctgacctgccacactaccggtcgaggtatcccctatcgtcagatcactgcgtaacgccaccacgtcccgctgcaaataggtttgctgaaagttccaacgttgctgggattcggtcgtttttttcactgcgtcatcgaatgagtcataccggttatcagtttgactgctataagaataagtcgccgtattccgaagacgccaggcccccagattcaatctagaattgaagctaccgaacagactctgattagtctgtttattaccaaattgtgagcgttgattctggctgccattgatgctgtagttcagtaaaaaagccggaatgccctcctgccataacgtcggatcaaccaagccattcgttgaaggcttcatcgctatttggggtacgctcacattcagccgcatctgggaaaagttcaagcgggccgccgcttggggaatcaatttacccaacggactctctatcggcttatccaccggcaatgctttcaacgctggtatgccgctgatattaacaccagccgcttccaacaaatctggggtaagtaccggcgtcagctcggcattaccctcgccatgacgctggaacgtaatatcacgcgtatcaaaaaaagtaccattcacgtagatatcaacacggtaagttcccggtgcctgacctcctacggtctcaaactgtgataagtctaccggttgaccggaattcgaaccaaagcccaataaagccggatcaaaataatcacgcgctgttgcatgagcgctccatcccgtcagaaataccagcatcacccgacaaaaaacgagagaaccccccatttggtgctttgatagggtaagagaggtagaaataccttgatttacacaacgacaacaagtaaacggccgttttgaacgacagcttattgccggaatcaacactttcattcttaattaccatctcttatttaacatatagaggttcattgctcatatctcttctgtcgataccttgcaacatcgctattgaccactgccggatacggcaatagatctactctcttcatcagtgtctaacccaaactcatcaatagcacgccacgatacagtgacatgactaccaggagacactttacctgccggcagcgaccagctctgctgaccaaagggtggcaccatcctaaacaaatccttgcccggtacggcaaacgaactgacctgcaaagtctgcaacgttatccaaaacggtgacggattagtcagcatcacgacatcctcttttactgacgcgcttaactgtttcaccgcaccggcaaccccctcttttagtatcccttcaggacggtagaacaatttcaccgccagagctgtcaccattttcatcttgccagagccatctctagatactggtaattggttctcagaaggcaacatatgcagattcagaaagaacagagattctcgatctttcggcaaaaccccaccaatacgaaggattttcaacaccagccgttcatctgcccccacctttgcaatcggcggaataacgataaatggtgccttaacccccagcggtaaaccggtctctgggtttagttcttgtacgattgactgaatgagataattgttgtcgctgttattaatgagtgtcgaagagactccgttgctggatgattcaggataaatcacacgagtgtcattgagatgcaaccccttcagactctctgctgccctgagtggcaataccggtaatattattgccagaacacatgacacagttataacgatctgttttattgaaatattacgctccaccatgtcatgctcttccaatttcaaaatataaaaacatacttagtcggcccgtaacgtaccgctctgtagtctactcactccaccggcatcggtgatcatcgaccatgtcactttacttcccgccgtacctgccaaggaaaaagtcatctggccgaaaggggccaacattgacggggctttgttaagatctactgccttgccatcaaatttcaattgggcaaaagtctggtaatacggtgttgggttagtcactacgacagtattgcctgctcgtataaatgtcagtcggccataggcctgctccggtgtcatcggcagcttatctggccggtagataagtttaatattcatccccagcgcaatagacagagatgcaccaatctctcctggttttccattgccattggccttgctctcatctagtgttttcttcgccggaatcgcattaatacgaaaacgaaacagagactctcgatcagctgggaaatcaccgccggtacgtataactcgcatcacgttcaagctattaccctccatgcgaaacaacggaggcaacacggtaaactccgatgaacgggtatttgagttatctcccggagtcacagcagcttgtattagatacacctcatcgcctgaattctgcaatgacatgctttgcaccttgtcgccctgatgataaataatacgtgtcttcctcaacataagacccgcatgtgctggtgacgatgccataaccgcccatatcgccagcattcccatgactatcatctttttcatatatcccacttcatctcagagaatcagataaaatcccttgaatacacccggcttaacaccatctactgatacacgaactcaaaatgtatattcacatccgctactcctccgcataatacattgatgctgttactcccggttttacaggttactggattatttgtatcgcccagacctcccacatacgccctgaacctcctcattgctccctccaatttcccaccatttccttttacactgtctgagaggtctaccctatacgggtcagtctcattccttacctctacaaacttgttagttccctcgtcgaataacctaacccctactcctttagtactgttaaatttggcatcaggcatgaaaagctccggatctgttatggcaggcacatcactccatatgtagagagcgggtcttgattcgcctagatcacagtcactaaacataaagttcagttctaagggatctcttgcgatatatttgctatttctaagttcactggcatagaccggagcgatataataattataaaaatcggcaaagctggacccattcacactcaacacacaggtcggaggcaataacatgcctctgaaattgattgtacgattcgtatttggatccttcgcctgcactgggaaagtcgtcacacaaccgatggtccatccaatcagcatcatgaagagcaacacatattttgccctgctgtgatatgtcattaattcactgtttataagattgctatttttcgttttcatctaactctttccgcctctcccaatttttatcatccgtgataaatcacacctcactgataagaaaatgtaaatgtgacgtgcgcaatcagcgtgccgggttgaataaccttactatctctcccacgtgcaattgctaccgttacatcagtctcaccactgccctcatcaaattcaaccggaacattgatttcgcgatgatttattatcaaatcatcattcagccctatttccttcttttcttctccgattaaaataataaaccccagcccctcagaagccccaggatcaccggaattaggatcactaaatattgaaccctgttcagcgtcgatggtatttccagatacagtgagcttggggacaaagcccacactatccggatcgccacaattcgttaatttcaacttaaatgacttggtggctgatacatccccttcatgactaaactccgccgccagcagggaaccaaaattcagctccgaaccattaatatcatcaccatcgatctctatgtcacaaggatcaggataaacagttacattcacctgtacgtctatcccactcgtgatcgtcggtgggtacttgggcccggtcttgggcttgggattggggtcatcagccatgacgctgcttgccaggaacagcagaaccattacagaactccagcagaagcagcgcatcacaacctgcaataccgggtttctacccttgggcaggaaggtcgacgggtcattcagcctgctttttttttgttctgtcgctgtcccaaacatcgtgctcacctcaaattaaccctatcactcttctgttaacgcgataccacgctgcaatgccgatacatcaacgataattaaacgtaaacgtcagtgtagccttgatttttcctgcctttttgcagaccgctaccgtctgcccgcctgccaaagcacataccagtgaaaatttcaccggcacagtaggcgttttatcgtttacgattgtgcctttattagccagatgaaacggttcatcgtcctttaaatctggggaccattctgttccactaaacttcttcaattgcacagtgatgcccactgccgttgaagcttcgtttttttcatctgcccctttatcacgaaacaagctcttatcattcgtaccaacatgatttccggtaacggtaatcgtgggagtaatactgttgctattgaccacactcgtgcaatttctcagcgtaatctgaatttccctgttaacttttcctaataccaagtctgcaaactgcactatgcccagctcgatattattgctgtccacaatgacatcacacgtgccttgcgtaatttcggccctaaatgtggccccaacagaattcgctgcccacaagggaccagaaaagagccacagaaccccacccatgccgatgtaattcaggtacctgcgtagatgctgaacccttgagatatcggctttactgaatttcaccatcgaagttctctccaccgccgagatcgctaatcaccgcccattccaccttctttttattctgactattctgagcgggataaacatgggtgctgaaaggtgccaacatttgtggatgactgtcagaaaacttcaccggcacaccatcaactttaatctgggtaaaactgatgtgataaggcgaattattactaacttgaacgccaccgggagcatgggtaaaacgcagcgctttgtatgccagctctggcgtacccaccaaccccgttggccgataaaatagtttgatggtattgccgatggcatagactactccacccgcaatcttgtcaccttcaagacgctgcccagaaggcttactgctgggaatagcagcagcattaaaataaaagacactctcccggtcagtcggcaacttgctggtatcacctaagatgtgcaggacattagttcctttagggtccaaacgaaataaaggaggcgtgacgtaaaatggtgttttacccttgccatcaacggtgctggtgattttagttgtcactaggtaagggatattggttgttgtattgcgcaccgagactattgcttcagctttatcctgtaagaaaataatgcgtgtagcattgatgccaaatccgccttcagcccagctctgtgacgcaaacaaaaacgcggccaatacaaggctttttactatgatgttaggaagtcggagtttactgatcatcttttgtttctcatatcttggctcaaccagccagtagttgcctaataaaaggcatcatccaatcatctaggatttttcatcgaagaagcccgaggagatgctcctcaggctaaagccacataaaagttagtcatacgcataggagaaggtgatgggggcagtaatccgctggtttccaggagcatctgtgctctttgtggctatatatacaacaaattctgcataactattcttgatatcaggttcctctttgttgtctttttttacattaggaacgatcatagcaaccgtgctttcacttttaataggcgttaatacattattttctagataacttagtactatacctgcctgtttattaatatctttgttaaagagataaccccctgatccctccaaggtgttacctgtcacatacaacttaactttacttgcatctttattgtctgaagagcagtcagcaagaccaatagtgaaatgcctttcactatcatttataaattttgaaattcctgcgcctggaaatttcccatctgggggggctgtaaaagctgtttttatatggttccccgtatccaccgtcccatttgagccagggttagtaacatcacatgttgcagtcacaatcgaaccggtaacatttactatggcattattcgccgcattagcagccgaagctgctcccaaaaccaacgccgccacgacgcttatctttaatatctgtcttttcatttcattaatctctttttaactacttaactaaaatctggttcaaactcgtgcatcacgttttgacaaacagagacatctagctgtacaaatatttgtcaattaggaccattttgacaattgatatacaaaaatttttctgtgcaaaaacaaagcaatatggatataactatagttatttcgcaaattttaaggatatttaattatttaatccgaaattagtaacagtaatttctttaaagtaacgaaggaagtgtgatgtttttacatattggaataaaaagagtggattatcgaaatgtttttgtggtaggatagttgcgttttacaaatatatacaaatctatctctttttttattagaaaacttttagtataatttctaggcaattgtatatcaattgtcaaaatggtcctaactgtcataccttaacgtctaccttttatactccaaactccttgaaaacgttcagcattactggctgtatagcgtaccgtatggcgaatgtttttatgtccaagataatcttgtatcagtcgggtatctatccctcgatctgcaagagcaaaaccgcaggcatgacgcaacatatgcggatgcggatctaccgcgatattcgcccgttgccctaactggttgataatctgatagatacgctggcgagtaagcggtttcccacaacgcgacaaaaacagccaatcactatccgcgccctgtaaagttttgcgcactttaagccatgccttaatcgccttaacctcacgctgcaacaggggatggttagtacaaaaccctccctttaaccgcctgatatataaacatttttcttttaattccatgtcagataaccgtaaatgcctggcttcactaacacgaaagccgtggatatagctcatataaaccagacagtaattccgttctggattaggcccaacttttgccatttccaacatgctttctacttctgattgagtcagatattttctttggcccatgattatttctccaaaatatattgatagtacaacccggctatatcccgcttagaacagacataagctaggataaaatagacaccgctacccaaaacgatggcctattgttcaccgaggctacaagaggttatacagatatggggcaaaatttaaacaccttttttgattattttttcacctcacaagcacgttagtttacatttgactgacaggacagattattcaaaacaggctacaagaacctgtcgttacaaatcgcctttttcgttatagcggcttactcttaaggtattgatatggttttcaaccagttacgaaggaaaatattccattgattacgttaaactcgtctgtattattatggatggtaaacaggctcaggccgtgacctgcgaaacctgacggactaccatgcaatctaacggagataaaagaaaccttatgagaggcccattgcttgatgccatccctctgacttccctacgtggcgtcggggcaaatcaggccgcaaaattagcaaaaatagggctggttaatttgcaggatctgctgctgcatttcccgctgcgttatgaagaccagacacgcctttatactattaatgatcttttacccggtatttccgccaccgtcacaggtgaaatcctgcgtaccgatgttactgttagtcgtcgtcgaaccctgatctgcaaaattagcgatggtaccggcgtgctcacactgcgcttttttaacttttcggcggcaatgagaaacaatctcgcgaaagggaaacaggttgttgtctatggtgaaatcagaagaggcggtcagggtgccgaaattattcatcctgagtataagattcaaaatcatactggaaatgtacagcttcaagagacattaacaccgatttacccgacaacagaaggtgttcgtcaggcgacgctgcgtaatctcattgatcaagcactgaaattactggatacctgtacaatcaatgaacttttaccggaagaacttagccgctctattattagtctgccgcaagcactgcataccttgcaccgcccaacaccagatattgcgctggtggatctggaaaccggcaaacatccagcttatcgccgtctggttctggaagaacttttagctcaccatttgagtatgttagccgtcagagctggcgtacaacgttatcacgctcagccgttgccgactgaggacaagttaaaaccgcaattccttaatcgcctgccattttctccaacccatgctcagcaacgggttgtctcagaaattgaacaggatctggcaaaagatgttcccatgatgcgactgattcaaggcgatgtaggttcaggaaaaacgctggttgccgcattagctgcgttgcgtgccattgcacatggtaaacaggtcgccttgatggcaccgactgaactactggcagaacagcatgcaaatacattccggcgatggctggaacctttgggtattcaggtcggctggctggcaggtaagcaaaaggggaaagcacgtcagaaacaacaagaagccattgccaacggtcaagtcgccatgattgttggtacgcatgccatgtttcaggaacaagtgaagttttccggtctggcgctggtgattattgatgagcaacatcggtttggtgtgcatcaacgtctggctttatgggaaaaaggacgtgaacagggttttcatcctcaccaattgattatgacggccaccccgattccccgtaccttagccatgactgcttatgcggatctcgatacttctattattgatgaattgccaccggggaggacaccagtcacaaccgttgcgatcccggatacgcgccgtgaagaaattatcaaacggatcagaaacgcctgtcttgatgaaaacagacaagcctattgggtctgtacgctgattgaagattccgatgtgctggaagctcaagcggcacaagccaccagtgaagaattgacgctcgctttaccggaactgaaagtcgggttggtacatggccgaatgaaagccgcagaaaagcagcaagtgatggaagctttcaaatgtggagaattacagcttttggtcgccacaacggttatcgaagtgggcgtggatgtgccgaatgccagtttgatgatcatcgataacccggaacggctcggcttggcgcaacttcatcaattacgcggccgagttggccgtggcgctatcgcttctcattgtgttttactttacaaaacgccactgagcagtaccgccagaattcgcctgcaagtgctcagagacagtaacgatggttttgttatcgcgcagaaagatctggaaattcgcggccccggggaactattaggaacacgccaaactgggaatgcggaatttaaggtagctgatttgctaagagatcagggaatgttgccggaaattcagcgtattgcccggcatattcaccaacactatcctgaacatgcccgtgccttgattgaacgctggctaccggaacgggtacattatggtaatgcgtgattgaggatatatcggagcgtttttttgtttctcaacgctgccaaaaatacagatatctggttttatccaatcattaagatgctctgctatagagctttcttttaattattccgtttaattgttcatgtattatttctaaaggaatgcaaaatagaactacaattattcctaaattagcaccagcgttaaaatatatccccataaaatataaatggttttttattattttcttaaaaaatcgaatctaatacctcggattaattgatacgacgtgtcactattcgaagtcttttatcagctaactggggtgacaggtggttccgacatttttcatcaaattaagttgatgatgtgtacggtattagcgcaacattatgctcaaaggttaaaacgagaatagatgtaaatctatgataggaaattttaattaatgtaacattgaattactaagtttaaatagtaaatatttctattaactcaatgaatttaattttaaatattttcttttcgaagtataaaaccttgatggaggtcacgcaaataatagtagttttgttggttttcttatctatacttatatttcattatggtacgtgttaggatgtttttaaatcagagctaaataaatctacgttgatataatggagaatttaatatgatttatgccaaaaatatttcagataatgtggttaaagttgcaattagtaaatggagtagtgacgaaggtgatgatgaatatattgatattcctccaggagaggtggctcaatggggtagatcagataagcgcggttatttaatgtcattagcacgtaaagatagtgccacaatgttgtattcaataaaatcaaatggctacataattatttatactagctatgttgaaaataacggtagccggatagactctttatattcgataccagctgtctaaaaaattttattatcgcactagtttttttaatttaatttttcttacatcattgaatttaataaaaatattcattattgatatagtggaggatttatgatttatgttaaaaatctctcaactgaaccggttaaagtttcggttaataaatgtggagaggaaggtagagaggaatatttagctcttgattgtgaagatgtcaaggtgtgggatctctccgatacgcatggttttatattgtcagtaatacagaaaggtattgaaaaatcatattctgcttctcataacagttttattattatttttgatgattatgtacaagatagcggcaccaatatatctcatcaagagaaataaatgagagcttgtcatccgatttaattgagtgttagacaaaattaaatcaccataatcaggaatggaatctccattcctgaactatttatattcaacggtttgctacttttcccctaatgcttgtttttctgcttgattgataaagatatctccagcctctttataattaatcagttgttttatcaacttcctctgccagcatttccagactaggtgcttagtcccaacatttgataaataagataatagaaaaaattatcgcctgatacctataggttaatattaaattgttttttggtggttggttttagattatttttatcgataatgagtaaaatttaaaattatgaggcttgggcaacagaatttagggggaatgtacatccttattgctacttttattaatacgcatacatgtaacttaatttactaagtattaactgtaaagcaaagaataaaaatcaccaaaagaatcgtaatatcttttctgtttataaaaaagtgagttattttgtttctttaggatttacattaaaaactatttcgtagagagcgggagtgataaaatttcaagtaaatactcgataggttgaattattatatttttctcagtcattggttaatggccggcaataacaaaataacacttaatagattaactaatcatattcactatgtgctttaagtcctgaataacgaagtttctcggaaactaattgataatcattgcggaaccaaatggcgcgggtaaattgacgctcatttatgttgttgagacactcctcatcagtaaaggctaaagtaagcggatgacgataaaaacaaaatgacttttttatcgtaaaacaaaggtaaagaagagccagacaactcattgaattattttttactttattggaatatcatcacgctggacgctctgcattgccagacagaaaccctcaatcttatcacccagcgttagggcgatttcattgcggtatatttattatacaattcgtttacaagctatttcataagttttcgcatcttcccgtttaccaacagcgatcaccaatattacgatctcttcttctatcacttggtaaaccagacgaaagcctgaagaacggagtttaattttaaagcagccagccagattaccgtgtaatctggctgaatcaatatagggattgttctgtaacttccgtagcttctttttaaattggtcgcgtatgctctgatccagtttgtaccactctttcagggctcgttcgtcgaaatcgatattaaatatcatcaaggtttaccctgatacgtctagcgggatttttaagacggtcacgtaccactgctaagatgtctgcatcttcatcatgatctgccaccataacggaaacttcagtgaacggcagcttttcattctccacaacatatcgcagaaagagacgtagcgcatcagatggcgataagttcagtttctcaaatgtctgatacgcactttttttaagttcttcatcaactctgatctgaatagtactcataacgttatctcctgtaatgacatttgtattacattctattgcataacatttgtaatgcaataaaaattttttgctataactggagtatatacccgtcatctttcaagttgcctctttgttggctgcactctctcaccccggtcacatcgttatctatgctcccggggattctctcccttgccgccgcgatgcatcttgaaatccatagggtataaactttagatcaatttcaaaataaggtttcagtgtcggggttgtaaacccaaactatccaaaattttgttgcgttaatttcagattattaacaaagtgctggtttttttatcctgcactttgttttaacagaaagatcaatagtggtcggggtcgtgccaaaaacgttcgtttgggcaatcccattttatgatcatttaaaaaaaccgagatttgccactttatccggatgacaatccataagaaacatcatcatctcagtagcatctttgctcaggtagaagcggaccattttttcgttgaactcatacagttttgccgcaggcacactgattgcatcgatgccgttcgacatcaagataccgttcatcatgaaacgtgaagtgcgtttgttaccatcaaagaaaaattgctgtagcgccccgaaaagaaagaatgcagctccctgttcaaaaggccgacattcacgcaatgcagcaagaccctcgtgaaaaacacgattcaattctggtgcgccagactcagtaggcaacggcgtatgacgcccctgattgcccaaactgacatctggagtgtaatttgtctcctgcccttccccacggaacattccccactccaaagcttcattacaagcaacgatgctatgaagttctgcgaatgtggctttggtcaattcaaattgaccggttttcactaaaactagtaagcgcctggcactctctgcaagatttaagatctgttgctgatcagaaaccttcctaccgccgacggtgacaccgtccaacaatgttttcacttcggggaaagtaaagggattgccttcaagtacaccagcatcccaaacaaattctggcagcatccgatgaaagcggaagcatacccgctcaatagaatgaataggaacaataagaggagccgcagaccggtcccaacgaaaccccaatgcgttgaaaagcttcatcgttgctaatcctttttactatttcgaatgcgctaaattataagtaaaacacaataaaagaccacctccccaggctatcccgccagaaacgctctcacttgacgagcggggagcaaatgtcgcggaagcttattcaacttcgtcacgtgtgactatgacggaaattcttgatcgtcacccatccccggtcgtgatcgcatttagtacgaattaataattactgaaagtttttctcttgttataaataagattccaaaatagcgccacatcttacatcactcataatttcgcctataacaataggttagtaaattcgcgcgtggcagaatcatgaaacgttatttatattaatatgttagtgatgaattagatataattttttaatattggttaattttcggataaatatgaggaagtaaaataaatataaaacacctattttttgtagaaactattattcttataataattatgttgtttaaacaatagagagatgccaatgagccgtcgttatgcctttaatactaaattgattttttggtagttggttttagattatttttatcgatagatggtacagattaagattatgagccttggcaacaaaacttaatgaagaaatacggggttatttgatggctcagtatgctgtttaccgcaataaatcccctaaatcgagggagtaataccctttcattatcgacattcagaatgacctattagacgattataattcacggacaatattacaaagtcagtgacaacggtagcaaagaattgcctcaaatagacgcgttaagagcaaaagatacccaaaagtcatcttggttggcggttggctattttaattattggtagctccatgcacttttagctataatagctattcgagccattttagacggaaggtgatgtatggaaattattcccgcacaactagctaagaaccagtttggtgatctgcttatgaaagttcagcgtgaacctgtagaaattagtaagcatggtaaacgtgtggccgtggttatctctcccgaagagtatgatcagttcgcacagctcaagttacagaatttaaaagccgttctggctgaatctattgcacaagctgatcgtggcgaattgcacagtattgatgatgtatttgcaccgttgacagttgatgaacttgagggtagggcttaaggatgagtgtccggtttactaataaagccagagaacatattcgtgcaatcaaactctattctatgcgccgatggggggcgaatgttgcggaagcttattcaacttcgttacgtgtgactatgacggaaattcttgatcgtcacccatcccccggtcgtgatcgcagtgaggatctttattttggtgtgctaagtttccccgtagagagccacattatttactaccgggaagttccgacgggtattgaagtgttggcggtgttgcatcaaacgcaagatccacataatcatctataccctatggatttcaagatgcatcgcgacggcaagggagcaaatccccgggagcatagagaacgatgtgaccggggtgagcgagtgcagccaacaaagaggcaacttgaaagatgacgggtatataatgaagagcataaaacgtgggatactttatttaattcgcaataaaataagcagctaaacttttgtatcagatgcttgagtgagttacccgagcgccgttttcctcagaaacctgagttgtcgaactatttcatccggttctcaccaaaatcccggctggaggtcaggaaaagttgttttgtaggacgaaggaaattcaaaaaaatccctcgattttcaccgggggattggtataggaaagagagtggatcttagggattatctggttaaatctgacaaacaagagctgtatcaagacaatttcgttggaaatcatcccaaaaacctgggggatgagcctcaatatctctttctaacagcatgggtttttgccatttaaattgtttgaaccccgccttttggatcgctgtttgatattgttcacgactccaacgatacatagtgaaagggctgggtggtgtggtaagaaattcagctttcacgagagtggtgtctttcaccggctcttcactcagaatttttatacaataattctcataattccctttctctaatcgataatcaggttcaaaggtatacgcaattaatttaccggcaggcttgagatgagcggcaatgacacggaacatagtttcaaggtcttcaagagattctgcatggcaaaataaccaagctgcattaactatgtcaaacttgccaaatgactccgactccatcttgcagatatttcttacgtgaaattcgatatcgtcaccgtattgttgtgatttgcttttcgcaatcgctatcatgttttctgatatatcgactccaatgactttcgacgcaccacgatttctgtattctcgactaaagagaccatatccacaggctaaatctaacactgatttcccgtgtatatctcctgccaggttgaagatagttctgatttctactttgatatggtcagtagcatctgaaaagctctcgtaaagatgtgcaatagggccatataaagtgttatctttcatgttgttatccttagctaaaggccaaaatactttatacccgtcatctttcaagttgcctctttgttggttgcactcggtcacatcgttacctatgctcccggggattcacgcccttgccgtcgcgatgcatcttgaaatccatagggtatatttatcgaagaaatatattatttagtacgaattaataattactgaaagtttttctcttgttataaataagattccaaaatagcgccacatcttacatcactcataatttcacctataacaataggttagtaaattcgcgcgtggcagaatcatgaagcgttatttatattaatatgttagtgatgaattagatataattttttaatattggttaattttcggataaatatgaggaagtaaaataaatataaaacacctattttttgtagaaactattattcttataataattatgttgtttaaacaatagagagatgccaatgagccgtcgttatttgaggaactatttccatcctttaatgtttaacggtatacccgctatctttcaagttgcctctttgttggctgcgctcaccccggtcacatagatagaggcgatagaagtattattatcagaatgactactcctgtccggttgtcaatattatttcatctattcgccgttcgaatttgctctgcatccgggtgacaatccacctaacaatgttttcacttcggggaaagtaaaaggattgccttcaagaacgctagcatcccaaacaaactccggtagcatccggtgaaaacggaagcatacccgctcaatagaatgaatcggaacaataagaggaaccgaagatcggtcccaacgaaaccccagagcgttaaaaagcttcatcgttgttcatccttcttactatatttgaatgcgttaaattataagtaaaacacagtaaaagaccatctcgcctgatattccaatggaatacaggcgaggctaacgggatctatctggacccccatacatacaggtaagaggtgaaactatgacggtgcttgcttaaaataaataatgattaaagaatacaaagacaatactgcaccaactgcatagcaggtgcagtatctctctaatttatccctacaccgccgggaaaacgggtaacagcaaatagagtttaatcacaatcgcgttaacgatatcgataaagaatgccccaaccatcggcaccaccagaaacgccacatgggatggcccgaagcgatcagtaatcgcctgcatgttcgcaatggcggtaggtgtcgcccctaaaccaaaaccacagtgacctgccgccaaaaccgcagcatcatagtttttacccatcactcgataggtgacaaaaattgcatacagcgccatcacgatggcctggatggtgagaataaccagcatgggtaatgccagcgatgccatctgccacaatttcaggctcattaacgccattgccaggaacagggaaagacttacgttgcccagtacagaaactgctcggtcaaagactcggtaaaaacctaacaccgatagactgttactgagaataaccccgataaataacacacagacgaacgtcggtaattcaaaccatgtaccttgcagaagttcagatacaaaattacctgccatcagacagatagcgatcaaggcgatcgtttccagcatcaccagtgctgtgatcatccgcccggtatacggtttttcaaatgctgtcggcacttcggtatcatcgcccctcaagcccggagtttttgtatttctcaccaggaaacgagcgaccggaccaccaatcaaaccacccagtactaaaccgaaagtcgcacaagccattgccacttcggttgcattttcaaaaccataacgctcactaaacagtttaccccaagcggcaccggtaccatgaccgccagatagcgtaacagaacccgccagtaagcccattaatggatccagccccaacagttcagccaaagcgatacccaccgtgttctgaaccagtagcaaacccacaacgacgaagacaaacgtgaacaggaccttaccacccgctttcaggctggaaagattggcattcaagccgatagtggcgaagaaagttaacatcaaagggtctttaagagataaatcaaagttgatttcccagcctgttgtttgtttaaccgctaaaagaattagagcaactaacaggccacccgcgacaggttcaggaatggtgtatttttcaagaaatgggacggattgtacaagtttacgcccaagtaatagtactaatgcagacgcaacgagcgtgccataaacatcaagatgatacatctatgtaccccagctatattgttaaaattatgtaagttattacgacgttatactcatcctttagagaacgccaaaagcaggcaacgctggattagaaaaaaaatctgcaacaaacacaagttaaaacatataaaaatgtgaccagagcgaatcatggcaacaaacagaatttttacgcaaacgattgcttttacgcagttgatcattaaaatgcgttctttgtcagtccggaatttcacaccatgctcacctcatcccctaaacaagctgaaacaatacccccgaaaaaatcagctagtgaattgatttatcgcttagaagatcgaccaccattgccacaaacattgtttgctgcctgtcagcatttactggcaatgtttgtcgcggtcatcacgccagcaatcttgatctgccaagcgctagggctgcccactcacgatacacagcggattatcagtatgtctctgtttgcttcagggctagcatcattgattcagatccgcacttgggggccaatcggttctggtttgctttctatccaagggaccagttttaactttgtttcccccttgattatgggcgggctggcattaaaaaacggcggtgccgacatttctactatgatggccgcattattcggtactttgatggtggcatccgttacagaaattctgttatcccgcgtattgcatctggcccgaagaattatcaccccattagtttccggtgttgtggtgatgattatcggtttgtctctgattcaggttggattgacctctatcggtggtggattctctgctatcgaaaatcacacttttggttctccagagcatctgtttctggccggtgttgtattggtggtgattgttttgctgaaccgccagcgtaatccttatctgcgtgtggcttctctggtgattgcaatgacggtaggttatgttgccgcctggctaatgggtatgctgccaccagcaacggtacaggaaaatggttcactcatgacaattcccgctccactctattatggtctttcctttgactggaatctgcttatcccgttgatgctgattttcatggtaacttcgctggaaaccatcggcgatattactgcaacatctgatgtttccgagcaaccggtcagcggtcctctatatatgaagcgtattaaaggcggtgttttagctaacggcctaaattctatgctttctgccgtatttaatacttttccaaattcttgttttgggcagaataacggggttatccaattaaccggcgttgccagccgtcatgtaggttacgccgtggcgctgatgttgatgctattaggactatttcctgcggtcgcaggatttgtacaacagatccctgaaccggtattgggaggtgccactatcgtgatgttcggtacgattgccgcatcaggtatccgtatcgtttccagagaggcacttaaccgccgggcaattatgattatcgcgctctctttagcggttggtatgggtgttgcgcaacaaccactaattttacagttcgctcctgactggctgaaaacgttactctcttccggtattgctgctggcggtctgacagccatcactcttaatttggtatttcctcaggagaagtagtttttctacaaatttgatctcgggttacccataatcgactcatcacgcacgtatacccgttatctttcaagttgcctctttgttggctgcactcaccccggtcacatcgttacctatgctcccggggattcgctcctttgccgtcgcgatgcatcttgaaatccattgggtatatatttcatcatcgtgcgtgatgatgatttatctcctagcggttggaaggccaaataaaatcgttaccaacccaaccatcaagatcgtattcactcatacactgctcagcaaaccctttcaattgatccactaagcccgtggcttgggaagccaataacacatcgactctgatagcttcgtggttgccggaataattgcgctcgtataattcatgcctgccagcgaattccgtaccgatcgagtcccaaatcagtttcatgagcttgactcgctcaactgcactgtaaccattggagccacgcatgtatttatcaagataaggagacagttccgggttggaaaaatcgcgggcatgagagttaatataaatcaaggcactgcccaaatcctgttcaataatctcttttacccgcgggtaacccagcgtcataaaccaacgataagctatcccatactcgtaccgaggcaatagggcatctccactccaaggctccggggatttaatcatcgcatcactgagtgcccaaaacatattacgccatgacaatacttcaccaacccgtgcttgtacgccacgaaaatccttcgtacccgtagcttcaacccccttaataagcaacccagaaagaaaatcaagtttaaccgccaatcgagtcacaccatgcaacatagcccgatgaaaataacccgattcagcaaaaaataacgaaactttatctacatctccatagataaatatgttttcccaaggaaccttcactttatccagaatcattatcgtatcgttctcatcaaatcgggacgagagcggataatcaaaaggactgcccattttatcagccgccattgcgtaagagggacgacaaattaatttcactcccggggtattcatcggcaaggtaaagaccaacgcaaattcccgtttctttattggtaaaccgtaatgaccaataaagttgtagtgactaatcgccgatcctgtggcaacaactttagcgccgctgacaattaatccatcatcacattctttttcaacatgaatacaaatatccccaatttcatcaggtgataaatgacgatctattggcggattaataatcgagtgattccagtaaaacacgctttcctgcgaacggatataccagctttttgcattatcagcaaaatcaccataaatttccggttttacgccgagcgaggtaagaaacgaagccttataatcagggcttctccccaaccagccataactcatgcgagcccacgcggcaatagcatcacgatcagcaattaaatcctgctgtgagcgcggtatacggaaaaaagggtgtgttacaccacaactccccgtatctgtcgccgtggtcagtacgtcacgataagcaggatcgtgcaaagcgtcgtaaagtttcgcaatagctcgggccggattttgaaaagcaggatggttgacaacatcgtgaatgcgttcaccataagcccagacttcccgaccatcgtttagcccatccagaaattccgttcctgtaagtgggcgggttgtgcggatattaccttcattcgacgatttttgtttcatgttttctgacatagaagattccttacattttttatttaccggaagatgggtgaaaataaactatgcagtgttatttcaagcatcaatcaaactgagaaaggaatagaaaggaatgacgaaaaaatatcattattccatttatagccatccattaatacattaattcattcggatgtcattggctatattatcatgcaataaaatatagatttaataattatattaatcacacaatataattattaacaaattcataaaaatattccaaataattaataaaacttagcacgaaaaacaaaaatacaattaattaaagattaatctccgaagtttattttaatagaataaaacgataacgaataattcattactttttcatttcataccctgaaattattagaaataacaactaatatagtgacttgttgatatttttattgttaaattatacaaaggaagctataagccgattggagtctgatgatgaaatggttaggaaaatcgctggttacactgttattactggtaatactggcagtaatcacggtttatgtcgtgatgcagacaaactggggaacacatcagcttagtcaatggctgagtcatcacagccgttatcaggttcaaataggcaatatcgaacataactggtcacaaccgggcaccctgacattttccaatattgtcattagcaatcagcaacaaactttcattttagcggctcaagttgccgcattcgatttcaactggcagcaactgacttccccgcgccattttcatcgtctgctattgcaacagggccaattaacaatcaaaggccagcaacaatccttaccttttagcgccaacattctgcaacttaatcagatggctattcagtcagaaaatgcaagctggcaaattcaagggcaaaacatcactggcggtatcactccttggaacccacaattaaatacgttggcagggaatggggaatttcaattcagcgctgataaactgaatttcaatgatatttctctcgacaaagtcattatgcgaggagataaccagcaaaataccctcactctccgttcatttggtgcaacattggcacagggttcggtatcaggtaatgggcaacgtctgcctgatggtagctggcagtgggataatttacttatcagcaatattcgttggcaaacgccaatggcacttgaggagttattgcgaaaaacgaacaaattacctgcaatcagtatcaaagatctgagtctcactaatgccaaactggaaggtaaaaactggtctgctaactatctggatgtctcagtaaaaaatgtcgggttgactaacgggatctggcaggcaaaagagggcatcattgatttcaacgttatggatattacgctgaatgatcttcatttcaccgatgttattggtcaccttcttcttgcaggcaatgaactcactatttccaatctcacttcccgttgggaaaaggggttattccacgtcaaagggcaatggaatcaccaaacaaaacaattcaacatcaccaatgctacggttgccggtttaacttataccttgccacaaaactggcatcagttgctgaaaaaatcattgcctaaatggatatcgcgattttccattaacgagctgacaattaacaacagcttactgattgatattaaccccgattttccattccagcttactgccctcagtggttatatctatgacatggaattactgaaagaagggaaatggggaatctggcatggctcttcgaatctaagtgccactagcgcaacatttaacaaagttgaattacgtcgcccttaccttaaattacatacagaaggagatacactgatcctcgatcaattagatgcttctgttgataacggattactgaaagtgaagggtacagtagatcaacaggtacagaagccatttactttagatttccggggaatagatgcagatttaacgattttgcctcaatggcggtgggtgccgttgaaattacagggtaaaggcaatttcacgctgttaatacagggagatcttgctgctgataatattaaaagtactatcgatggttcattgactgccacggataaacaatcaggcagcgaaacgcaaatcatcaataaggggcaaatatccaccccaaactgtgaaacctgtccggttgttaagttatagtaacgaatattcgggtacctatgtacccgactcaaccctataataattactttctatttcaatccattaataaaattttcgatcagtatcagccgaaaaaccgtattaatatcgatgacattaaaaacgcaattaaatttcacccatgaagttgtaacaaggcacaaaaaatgacgtgtatactgcctgaatccattgaaaacaaactgcaaaattatgaccgtattgttgtcggtggcatcatcagagatcaaaatggcaatattctgttcttacaacgagctcctgatgaatccccgccgaatctctgggaaattccctctggcggtgtagaaaaaggagaaaatctattacaagcactatctcgtgaaataggagaagagaccggactgtttcttgatgatgttattggttttatcagcgcagtggaatattctattaaggagactcgatgccttcagataaattttaatgtcatatgcactggtgaaattaagctttcgcctgaacacacgcaatatcaatggagcaatatagataatttccgcagtgaacttgatgactttatgttacgtgtattcaacgagtcgtgaaagtcccccagtggcatatttaatgccactgagaaatctaagcgatagccgtataagcattcggcaataccatgtaggtgccagtaaataccgcaccgattccctgatcaccactgacaatcacatccagcttcactctcgctttactgccttgtgccaaacgagccaaatcgccgctcatatttttaagatcggcaacagattttggcctgccaataaccggttttttgtaacggatatcggcatcagccagaatgatatcaccacctaattgacgttcctgtaacaacagccagatcaacccccaaccggtcagggttgccagagaaaatagactacccgcaaagatagtttggtgaggattttgattcccggcttccggcatggtggtaataaagctctgaccggtatattgagaaattcgtacccccattttttcactaaggggaatatgtttgtaccaagcctgttgcagttcgttgcaccaatctggccggtgaagaatatcatcaagtgttgcaaccggctttatcatcagaaaatgacgaacaggtgtcgtttgtgggctagtaattggcccacggttttcaaaccccaatttactgaaaaactccaccgcatgttcacgagcactgcatactacccgtttaacaccctcttgacgggcaacagattccagggccattgcgattaattttcctaaccctctaccttgcatgttgggatgcactgccagaaagcggattgccccttcactatccgcattgatatataaacgccctaccgccaccgggttgcctttctcatccacaaccatctggtgatgagccgtcgtgtcgtaaccatctttctcagagcctacaggctgatgcagtggcttccgcaacatttcccaacgaaatcggtaatatgcttccagttcttgttctgtttcaggtactcgcagatgatacatagaaactgcccctttcttttgatcatgatgtttaatcggggatggttgcgttctactggctatttttggttgctagacctgcaaccagaaagtgactggcccatcgtttgtcaggctgactttcatatcggcagcaaaccgcccgatttctgtttttacaccactttggcggcattgttcaacaaaatagcgatataattcgtcggccttatctggggcagcgccaccggaaaaactgggtcgcatgcccttttgagtatcagcagccagtgtaaactgggagacaaccagcaaactgcctccgatttgttggacgttcaagttcattttgtcctgttcatcactgaatatccgataccctatcaccttctcacacaaccgttttgccttctgttgatcatctcctttctcaacacctagcaacaccagcaggccgtgaccaatttccccaaccacttcgttcttaaccacaacatttgcctgtgttacccgctggattaacgcgatcatatttttcctttattcaatagtagcatcagcacactatcctctattatccgttcaatccctcattttgttcagaaaaaccgattgcttcgaaataatctggcactgtctgcctatcaacaacatgaacgctattgatccctaacgccttggctgcttccacattttccagcacatcgtcaaaaaacacggcctgatccggtgaataaccctctgtctcaagcacatatttgaaaatatcaggttcaggtttacgcattgccaaatcctgcgacaaatagaggtaatcagcggatgccgcaatctcaggataattatgtggccagtaatcgaggtgcaaacggttggtgttggataacacgacaacccggtgtcccgcctcacgcaatgttttcattatctgaatgacttcaggccgaatattaataaagatagcatgccatccagcagcaaactgctcaaaactgagtgaaatattcatttcctgacataaagtatcagcgaattccagatcagtaatttgaccacgctcatgtttttcaaacgtttctcccatagagaaacttttagtcaaagtcgcaagaggtgtcccgctcaaattactccataccgctaaaactcttttaaaatcaatctcaatgatcacattacccatatcgaagatatataacataattaccccctggctaattaataacttttcactttaatcgtatttccaatgagaaaacagtacggacaagtaaaaagcgaatcacttcacggtatttttcttacgaaacgataaagtagcatccagattaaaaaagtcgagtaaggtgttatagttatgttgtggttcctcctctgtatcggccttcttctggctggatattttatatatggcaagattgtcgaaaagatattcactattcgaccagaaagaaaaacccccgctctttctatggctgatggtgttgattacgttgcgatgtctaccccaaaagtttggttaattcagttactcaatattgccggcgttggccctattttcggcccaattcttggtgccctctatggcccacttgccatgctgtggattgtattcggctgtatctttgctggtgcagtacacgattacttctccggtatgctcagtgtgcgtgcccgcggtgcatccgtgcccgttatcgttggtaacgaactgggcaaaaccatgaagcatttcatgaacatatttgcggttattctgctgatgctagttggagtcgtctttgttttgagtccagccggcttactgaataacttgctgaaagaggcaatgggttgggataacattgctatctgggtcggtgttatctttgcttactatattctcgcaacgctggtgcctattgataaaatcatcggtcgcctttacccactgtttggtgcattgctgctgtttatgtctgttgcgctgatggtcggtttagcgatgagcgataaacctttctattcacaaggattggatttcaccactaacttcaacccgaaagatctgccgatctggccattgctgtttgtcacgattgcttgtggtgctatttctggtttccacgccactcagtctccgctgatggcacgttgtatgcagaatgaaaaaaatggccgtttcgttttctacggtgcaatgattggtgaaggtattatcgcactaatctggtgtacattgggcctgagcttctatgaagatactaacgcattacaagccgtgattgatcaaggtacggcctctctggttgttcacgaagtgtccacgtctctgttaggtactgtcggcggtattctggcaatcctcggtgtggtgattttgccaattacttctggcgataccgcattccgttctgcccggcttattattgctgaattcctgaatattcctcagcaacaaatgaccaaacgtctgttattaagtgtgccaatgtttattgtcggttatctgattaccaaaaccgatttcaatattatctggcgttatttcggttgggcaaaccaaaccacagcaatggtcatgttatgggcggcttccgcatggctgctgcgccgtaataaattccattggattactaccctaccagccatgtttatgactgcggtgtgcttcacctatctggcatttgcaccagaaggttttgcgctaaactggaatatctctgttgttatcggcctggcagcaatggcggttgtcacaatgactttctttgcaaaagtccgctcccaatcagcttccgataatataaaagctaaagcattaaatgagtaaaaacctaagaagaaattaaatatcacaacagcccctcacgataaaaagttgaggggttttaattgccagcctcctttatcgtgataagcaacacttattcctcccgaaaatatcaggcaagatatcacatggatattgataatttaagcgttacgccagaacaatgagtgtctacatattgcaagttatgccagaagctcacggctcattatcgtgacaaacaatgaaaaagcattcatctgggtagaggattaattgtagaaaattaggcagattaggccatttaaaagcaaacctacgaatagtcgttaaattgagaagtttccaggcaaagatacgatttgtcgttttaaatcgtttcctgcttaactattaaataaaaaacagctcattgaaactctcgccaaatgataatcacgctaatcctgctgaatggtggcaaacataaacaagattgactacaattgttattagcagcacactacgaatagtgtgttaaatcatacaccattcgaatactaaaactttgctttaataaatgtatacccaatggatttcaagatgcatcgcgacggcaagggagcgaatccccgggagcatagataactatgtgaccgaggtgagtgaatgcagccaacaaagaagcaacttgaaagatgacgggtataggtttgtacgttttcaaatgcgataccaaagagaacaacgcccattaatggcaccaaagcttttcttttaatggacaacttgtctttggatagttgatcgcttgtattgaagtaaacgatcctaaactgagttcgataaattccctcccctgaagaaagcaatctactacagggaaagggcttgaatgtttttagaaaacaggagaatcaaccatgtatatgtttttaccttttttactcgcattatttgcggttatcaccaccctatatggcaagtataaaacgagttataccctctggggccttctttcggtgacgactgtagcttggtttatccatcatgcaactgattcgttaaatctatctttttaacgggagacaatctgatgaatcaggtattagcaacaaaacaacagatcagcttcggcatgatatttaacctcatagggttatttgctatcagtgctgtcctaacccttgccttctattatcaattggtcctttcagaactcccttgtccattatgtttgctacagcgagcaggcatgatcatgatagggtttggtttcctgtttaatctgtgttttggtatcaaaagtgcgcactatggcttatcacttatcggctgtgtcgtgactggcattgttgcgatccgacaagtatttttacatatcacacccggtgatctcggttatggttccgcgctttttggtatacatttctacacttgggcccttatctgctcagtaatcgcgattatcggcatatccgtcatgctgatattgaaaagcctggaaaaaacaaccgaagaaaagcaaaaaacatctgccatcggtcagattattatcggattatttgtcatattaattaccgcaaatttaatctccactattttggagtgtggcggtgggcagtgtgatgacaacccaacgttctatcaattgctcggtaaataattcatttgttaaaaaaactcagggcgccattggcgccctaagcatgggtattgcaggaaagattatgcttctttactgcgatacgcacgacggcgttcgttttccgtcaaatggcgtttacgcagacgaatagacaccggggtcacttccaccagctcgtcatcatcaataaactccaaagcctgctccagggttttcttaatatgtggagacagggttgtcgcttcgtcagtaccagatgcacggacgttagtcagtttcttacctgtcagacagttaactgtcaggtcattagaacgagaatgaataccgatcacttgaccttcatacacttctgcaccatgaccaaggaataacttaccgcgctcctgtaagctgtaaagtgcataagcaactgctttaccctgaccattggaaatcatcacgccgttctgacggcgaccgatttcacccggacgaatatcatcatagtggctgaatgttgcatacagcagaccggtaccggaggtcatcgtcatgaactcagtacgaaagccaatcagaccacggcttggaataacataatcaagacgcacacgacctttaccgtctggtaacatatcgcgcagatccgctttacgctcacccaagccctgcatcacatctccctgatgctgctcttcaatatccagcgttacttgttcgaaaggttcttgcttacgaccatcgatctcacggaagataactttcggacgggataccgccagttcaaaaccttcacggcgcatgttctcaatcagaacagataagtgcaattcaccacggccagaaacacggaacgcatccggatcttcggtttcttcgacacgcagggcgacattgtgaaccaactctttctttagacgctcaaggatttgacgtgaggtgacatatttgccttcacgtccacagaaaggggaggtgttaacacagaaatacatgcttaccgtcggctcatcaacagccaagggtggcaatgcttcaacagcattagtatcacacagcgtatcggaaatattcagctcacccaagccggtaatcgcaacgatgtcgcccgcttccgcttgctcactctcaatacgctccagccccagatgacccagtaccttaccgattttgccgttccgggttttaccttcactatcaataattgtaacgttctggtttggcttaacagtaccgcgcttaatacggccaatcccgataacaccaacataattgttatagtccagctgagaaatctgcatctggaatgaaccattaaggtcaactttcggtggttctacatgatcgacaatcgcctgatacaacggcgtcatatcttccgccatatcttcatgatcagtaccggcaattcccatcaatgccgatgcatagataatggggaagtccagttgctcatcagtcgcacccagattgacaaacaggtcaaatacctgatccacaacccaatcagggcgtgcgccaggacggtcaactttgttaatgaccacaatcggtttcaaaccatgagcgaacgctttctgtgtcacaaaacgggtctgaggcattggcccgtccatagcatcgaccagcaagagtacgctgtcgaccatagacataacacgttctacttcaccgccgaaatcggcatgtcccggagtgtctacgatattaatacggtagtcattccatttaatggcggtattttttgcgagaatagtaattccacgctctttctccagatcattggagtccatcacacgctctgtcgttgtcgcacggtcaccgaaagtaccggattgttgcagcagcttgtcaaccagggtcgttttaccgtggtcaacgtgcgcgataatggcgatattacgcaatttttcgatcacaaactttgcctcaggcatttatagaaatggcgcgctattgtacacacattggtcgaaggactaaacaggatcacaataatctacgcttaacaacttgataacaatgaaattgtgatccctttcacacccataaatagacgcatttttgacataaacgcactaatattgtgcgcctcagtaatacaattgcaccaatatagtgcaattttcccaaatattcagatatcccatcaccggtatacccacgatacagtatattgcaaggcgttaaaaagttggcatgcttttcgcaaaagcttttcgtgattgaattgattttcacaactatttgactttcacaactataagtttgcaaacgtgtaatataaccttgttaaggtaaaacgatgtgattgtgttttctttagtcttaatcacgacaattttatcaagaccgacacaaaccaggagaaaccgagtatgtccgttgaacatgttttaaccatgattgaagagcatcaggtgaagtttattgatttgcgtttcactgataccaaaggcaaagaacaacatatgaccattcctgctcatcaggttaatgcagacttctttgaagatggcaaaatgtttgacggatcttcaatcagcggttggaaagggattaacgaatctgacatggtactgatgccagacccaagcacagccatgcttgatcccttctttgacgatgccacactgactctacgttgtgacattttggaaccaggcactatgcaaggctatgaccgtgatccccgttccatctccaagcgtgctgaaaacttcctacgttcaagcggcattgccgatactgtcctgtgcggaccagagcctgagtttttcctgtttgatgacgtgcgcttcagcagtgccatgtctcattcttactatcacatcgatgatatcgaagctgcatggaattccgggacgcagtacgaaggcggtaacaaaggccatcggcctgcggtaaaaggcggttatgctccgctgcctcctgttgattcttcgcaggatttacgttcagcgatgtgcctgacgatggaagagatggggttggttgtagaggctcaccatcatgaagtgggaacagcaggccaaaatgaaatcgccacccgctttaacaccatgaccaaaaaagcggacgaaacccaaatttacaaatacgtcgtacataatgtcgcgcacaattttggcaaaaccgcaacctttatgccaaaaccactggttggtgataatggttccggtatgcactgccatatgtctctgtctaaaaacggtactaacttgtttgctggtgacaaatacggcggtctatctgaactggcgctattctacattggcggtattatcaaacatgctcgtgcgctgaacgcgtttaccaacccgacaaccaactcttataaacgtttggttccgggctatgaagccccggtgatgctggcctactctgcccgtaaccgttcggcatctatccgtattccggttgttgccagcaccaaagctcgccgtattgaagtacgtttccctgatccggcggctaacccttatctggcattcgccgctcaattgatggctggccttgacggcatcatcaataaaatccatccgggtgatgcgatggataaaaacctgtatgacctaccaccggaagaagctaaagagatcccaactgtcgcctcttctctggatgaagcactggcagcactggatgccgaccgtgaattcttgactcgtggcggtgtattcaccgatgacgccattgatgcttatattgacttgaaaaacagtgaaatagagcgtgtccgtctgacaccacatccactggagtttgaactctattacagtgtgtaattagcagcaccgtttccgctgatcattttttgttgccgtgaaacctttagcccatcttcggatgggcccttttcctgctatccaaatttcaggctttgactgggttttacgctcgaacatgatacagtgcaccaaaaaagtgcaggagtgtggatgaaaacggaaaatctgcccgatagcgggcaaatattaaattcgctcattaacagtgtactggtactggatactgatctcgtcatccgctatgccaaccatgcagcactacaattattcgctcagagtgcccgtaaactattcggtacacctcttccagtactgttcagctatttttcactggatacagaactgatgcattctagtctggtcagcggccagagttttactgataacgaagtaacattagtggttgagaaccgctttcacattatgtcgctcagtgcccaaccgatttccgagcagttcatcttgctggaactggcacctatggatagtcaacgccggttaagccaagagcaggtacaacaagctcagcagacagccgcacgggaattggttcgggggctggcacatgaaatcaaaaacccccttggtgggttgagaggagccgcgcaattgctgtcaaaagcactgcctgatcctgctttgcaggaatacacccaggtgattattgaacaagccgaccgattgcgccatctggtagacagattgcttggcccacaacatccgggtgaacgaattaagcaaagcattcattatgttgctgaacgagtttcccagttagtctcgctggaaatgccggataacgtcacactggtaaaagattatgatcccagtttgccagaactggcccactatcctgatcaaattgaacaggtactactaaatatcacccgtaatgccttgcaagcgctaggaaaacaggggggaaccattaccctccgcactcgtactgcttttcagattaccttgcatggtaagcgctatcgtctggcggccagaattgacgtggaagataacgggccaggtatcccgccacaaattcaggataccttgttttacccaatggtcagtgcgcatgaaggcggaacaggtcttggtctatccattgctcgtaatttaatagaccaacactccggcaaaatagaatttaccagttggccggggcacacagcattttctatctacttacccattaagaaatagaggataacgatgcaacagggaaaaatttggatcgtcgatgatgacagttcaatccgctgggtactggaacgggcgttaagtaacgcggggatggaatgtaccagttttgccgacgcggatagcgccctgaccgcgctggcccaaaacacacctgatgtactgatttcggatatccgtatgccgggaatgaatgggctaaacctactgaataatatcaaacagagcaacccgttgctgccagtcatcattatgaccgcccattctgatctggatgctgcggtcaatgcttaccaacaaggcgcttttgattacttaccaaaaccctttgatattgatgaagccgtcgcattgctggaacgagcgcttagtcactcccgcgatcagaatcaatcaattaaaagtccacaggttgtcacacccgtttctgacatgataggagaagcgcctgccatgcaggacgtttaccgcattatcggccgcctctcccgttcctctatcagcgtcctaattaatggcgaatccggtaccggaaaagagctggtggctcatgcgctgcaccgtcacagccctcgggccaatgagccatttattgcccttaacatggcagctatccctaaagatttaattgagtcagagttgtttggtcatgaaaaaggggctttcactggcgctaatcaagtacgtcatgggcggtttgaacaggctaatcgtggctcactgtttctggatgaaattggtgatatgcctctggacattcagacccgtctgttacgggtattggcggaaggtcagttctaccgagttggcgggtatgctcccgtaaaagtggatgtgagaattatcgcggcaacccatcaggatctagagcgcttggtacagaaaggcaaattccgtgaagatctctatcaccgcctcaatgttattcgtatgcaattaccgcccttacgtgacagagtagaggatatccctcgcctgacccgccatttcctacaacagaccgcaaaagaattgggcgtagaaacaaagattctccatcctgacgcagaaatagccttaatgcgtttaccttggccgggcaatgttcgccagttggaaaatatctgccgctggctgacggtcatggcggcaagccaggaagtattagtgcaagatttgccatctgaattatttgaaactcatcataataccgaaagcggtatgacaacatctgtaaatacagtatctataaataccgtacccgcaaatacaacacctacaaatacaataccgaaaaattggtcgcagctacttgcccagtgggcaacaactgcattggaacatggtcagcaggatctgttatcggaagcattaccgttattggagcgtaccttacttgattgtgcactgaagcataccaaaggccataaacaagaggctgcacgattgctaggttggggacgcaatacgattacacggaagttaaaagaactcgggttggagtaaggatatattcgcaaatcaggctattgcctatttatggataccccaattttatggttgaaacagggctataatcgccccatttctatctctcttaccagtgctgatatatctacaccgtaatttattgacgtttccgactctggtccgcatgcctgctcaggaatccgttgatgttgatagtgggggttcttgctctgctgaaagcccttagtaaacagtatttcagctcgcaatgcttcaaaactgtaaccacgaccaacatggttcaccactctaatcaaattgttcagattctctatataagcattagtgatcgggtggtcgaagtaagcaaaaacatcatcatgccagttatctatagctttaacgagtgggtcaaaatacaccttcatttcaggtgttatctgtctaagccaaacatagtaggcttgctgtgcctcgtacctatttttgcagtcccatatgccgaaaaatgactctttcaactcgtaagcataacccaagtcgggatagttgagtatccagtcagagaatcgcatatattcagcatctgtctgctcatggcgacgtttcagcaacacaaagtgatttttcatcagtcttcgacgctgctgagctgtcaagccgcttctgatggcctttagtgctctttctagtgactcattcgccatacggacaacatgaaacttatctatgataaccgtagcgtcagggatcatagtagccactgcttctctgtatggtcgccacatattcatagcgacatagcgcacctgatagcgatcttttcgtttagttaggtagcgcataacagtggctttgttattgttatcaagcatatcaacaatggtttgcagctcgatattggcgataacacaccggggttttatgatatggatttcatcaatacccagccatttaggcatttcaaaattaaaggtcttttccagtctctcgcaggagtcgtgaaatatattacgaaccgtcttttcgtccacacctacgtcctctgctacgctggaaaaggtgcgccgtagactctcacgctcaatgtattggatcaaacggtgagtcatttgccgcttaccatccttgtgtggtactggttccataaacgtcttacaacatatttgacaacggtagcggcggcgattcagtataatccctgtccgcttgccattgacaggagtatccatgatcacctcatcacgacggccaaagccaacgatttcaggatgcttgcagtggatgcagtgagtaggtgggttggccgtccctacatgtacccggtaatcatgctccagttcggagacagacaggacgatataatcaggccagttaaggatgtttgccataatagccaacttatctttgtcagttattctacgagcgttacactccaggtgatcaaaacatcctccgcgaccgattttattcgcttgataattttctggcgttctgttttgtcgtgacactgatgagcctcttcaacaagctctgcaaggttagtatgcatcgtgttagtaatatcaaaattaggtaatgatagatgtttgaatacatccgcaacttgaatggatacattgtggctgttaatccattcctgaacagttaatgaattcaataatccgcacaaataatatgctgtttctttgttatcaaaggacgcaaagtatactttgtgatctggaatataaacacgttcaccaacaacaggtacattctgaaagcttgcaaccgctgcataaaacgatgaggacatttctggccatatcactttccatggtttgaaggtgtaatcgccaacattataaacagcatggtaaggagcgcctttcatttggcgacgataggtagaacgctccagtaacagtctctcgaaccctttaaaccatgctaaggtttttttcatcttaggggaattcaactgtacatccgcactctcgtactctgcatttgaaatacctgtgtttggtacgaacgtaaacagtctttgttcaacatcatcgtaatctggagcatcaagtttcaagtaacattcatcaaaatcactcgctcccttaattaaaggataaagcatattgggctctacccactgagttttctgtggcccaatgtctttccgtccagcctccgggcggctttgaatctgaacgagagcgccgttgttttgcaagattggaacaaaataaactccgttaagatccgtggtgatccctttccgtcctttagtccatttacacggtgatgatagatatttaatcgcgttgaagcgcccaggagcaagaattgcccacggagaaccttcatcaccaaccggaaatgcttcttttgtcgtatgagaaatagctttcagcacgtcatcaagaggtgtgcagggcctaatagctttcctgtgaccaggattagctgaccataccttgtaagccacggggtattgtacagagacgatggattttcgaaacagagcaacagacgtgtgattgcttgcatcttcaaatggtttcaattccttcatgtcatcaacagacaatggttgaagataaagagaatcctctcgctgtgaatctaatttaaatgttctaaaacctgctgacgatgggttcttaaaaagtgtgccagtgatgacaaacgctagtttgccacctatatccagccatttgtcggagactgtgtaggttatcatggcagatatatcaagttcattcccaccatgacgcttggtcttagaaaaaataccatagtcttcacacgttggtttaacacgttcacgataaaggtcaggtagctttgaccatctaacccaaggaggattgccaataactaaatcaaatttacctgctgccgctgaccagaagaagttcctgacaatccggaaccaaataccgttccattgctttctgtgtagatttaacacttgatcataggtgtgtcggagtggcttgtaccagtttaataactcttcttgggtgactatacttgctgctatcagtttttgactggatttatcaaactctaatccctgcacaacgtctttgcccattcgttcaaaaacaaaatcgagacgttccctgtttaaggctaactcaacaggcaagtgaatattcagtttggctacctgacttccgatgttgtattcaacaactctattttttccagaggggatctccgcaggtgaataaatggcatcagccattagtacaggaacctcaatatccattcctgggcatgcagcgagaaggtctgcaatttccatcaggaaatttacacgagcagtctgaacagcaagcgggttcaaatcaaaaccccatacactatcacataggtttttgatgaccttagacacactccatccttgtattgccgccagctcacgctttttacggatcaccgccagtaagaatgccccagatccacaggtaggatctaacacacgctgctccaataatgtgtcgtcagcagctctctgaagcgtaaaatcaactaaccaatctggggtgtagaattcaccaaggctctgccggagtttgccaggaacaagaccttggtatagatctcgcaaaacatcccttgtcctagataaatgatcaagccgatataacgatagaaccgaaagcaaccgcctcaaggaaggtagtaacgccggaacaaccttgtttctagcaaggccaatataccagctaaaaatagcctcttcgacaaaaccgttaatgcccgcttccctgaaaatggccgatttctcgacagagtagtccaaataattaaccagctcatcatcatctttttgcgccgacatactctgagcaggttgagtcgatgatgttaatccgtgtgctgatacaatctcggcagctaacagtttgatgagaatcgaattgtaagtatgaatgacaaatagccgtgcggatgtagaatcttccggccaaccattccagataaatgcaatctctttgttaatagcctctgtttgtgaaatcgacatatcagcaacttggccgtacaaagttctccactcctcaaaaagcattttaactttgttgttgccttgctgttttaagtagtaaagcaaaccatcagacatagcttgcataaattcacgggcatttgctgacccatgtccaaaatcggctaataggttctcagttgttaaggcttttcgcgtatcggagacaaaagcgtcaatcaccaaatcgaccgcataggttgaaaagggaatcaagtgttgagtatgaatctgatcaccatggacctgagcaaaacaaatgtgctcaccgtcaatagctattccaatgaaatcagattcgggaattcctgttttcgttgactcacactgtatatatggcagaagtcgttcttctatggcatttttgaagccagcgctctccttcttgccacgaaacaaacccggcgctttgaattcaatgattacgtgattatggcttgagtctttacgcccgcgcttagcattcaaatgaaatccagtagcatcttctatcgccttcatccaaatgtatcgaacttcctcttcacctttccaaggctttaggcgcttttcctgaatagcttcgtatgcctcttggcccattacgtaccaccttataaaccggtgtaaaaattttcccaattatgaacctgaacaataatagcatcaaccgtataatccgattttaaaaaatttaaccagataaggctgaccaatacagaatgccgtgtcaacaattcggcaagttagggatcgtcataactgattgactggctgtattttatctgataaaaccagtatcaaacgtgattaatttacgatcaatcgagataatagaatcgacaaaaggcaagattgagcagtatctatcaccctccaattgaaaacgacaattttgtccaagtgaacagagcgtatctaaaagaatagcgcttcttgataaggagaaactcagtaacctcagaaatcctgatatacctaattgagaatgtaggacacacaaccaacgcaggaacatgtagcgatttaactctgaccgaatatggaggtatcttgagcgtctgtaacgcgcagtaaaaatactcaaagaagatcgctggattgaggttgtaaggctcggccatatgacaacatattgcgtcaatgcaagcgtattctggcaagcagcctgaaactcgaaaaaatacgcaatatttcaagctaccgttattaccttaccaagtgagcaagaacttaatttaaaaaaatcacaatctctgttgtgatttatattcaaactagtaattaaaaggttggtttaagatgatgaagtggtgccggattattgtggcgattattctgttttattctcttttcgttggtatgatacaagtgttatcgatcaatttttatattttccatgattactttggattgtggaagattccagccaaagtggccgctgttatcgcatctctttacgttttttgtctacttgttaagtttttgcctcttattattgctatttttatatgtagcttagttttggtggtaaatgtatggcattggtcattgtggacttcaatccttattcttatttggccggttattgttgtcttggtttattgcgtactcaccaaaagcctgaaatataatacatcagacttttaggaatcagcaggtcagcgaagaagaagttgctcgcgtacttgcacatatgatggatgattgaatttatatatgaaaaataaaatatttagcaaaaggtggttcaaaaatcttttttatgtatttattaaagaattattgtggtcaaatatgcccgttatagccatttttatatgtgggattgtatcagtgtatttcttccccgatgaatggtggattgcatctttaataggaagtattgtaattgtcgttctatttcttgttcttacatatttaagtgaaagaaaaaaaagctaagcatatacgcttagctcagaccgctgacaaacctcgttgaaaataacgtttttttctttgagactgtaatttaaattgtgtaattgccattttatttaaacagatattaggtaaatgaggttaaatgaaaaccgtaaaaccggatattcaaatgtaaaataaaaagactttaacgaggttaaaacctttttatttaaaaaccatgctctgaacaatcaaatcacccttgaaaactgatgctggcgaacctgttggcgcaaataaatatcaaaacacatacagatattacgaatcagtaaccggcctcgcggcgttacccagatctgtttctcattcacttcaaccagtccatcgtcaaccagtggcgttaataattgcaaatcttcggcgaaatagcgggtaaaactcagctcatattgctgctcaatatcgataaaatttagacgaaaattacagattagcgctttaataacatcacgacgaatacaatcatcttgggacagcgttaaaccacgccataaagcatgctcctgtttttctaattccgcataataggtttttaactctttttgattttgagaatagctatcgcccaacatactgatagcagaaactcccaagcctagcaggtcacactcttcctgagtggtataaccctgaaaattgcgatgtaatttcccttcccgctgagccaccgccagttcgtcatccgggcgagcaaaatggtccatgccgataaattgatagccattacttgtcagcgttgcgattgtttcttgcaatatatccagcttttgttcagcactcggtaaatcatgttccttaattttacgttgagcagcaaataaactcggcaaatgagcataattgaaaacactcattctatccggtgataacgctaatactcgttccagagtgaaagcaaaactttctggtgtctgtttcggcaagccataaatcagatcaatactggtggaattaaaacccgtttcgcgggcacgagctaccaaagcaaagataaactcttcatcctgttcacggttcaccaaatgctgtacttctttattgaaatcctgcacgcccatgctcagacggttaaaaccttcactacgcaggtgatcaatcatatccagttcaatttcacgtgggtcaatttcaatagaaatttcagcatctggcagaaaatcaaaatggtgacgcaacaatcccatcaatttactgatttggtttttattaagataagttggcgtaccaccgccccaatgcatctgactcactttacgaccagaaaacaactttgcccggccacgaatttcccgttcaagccattgcaaatattcatccgccttatgctttcgacgagtgaccaatttattacaaccacagaaataacagagcttatggcaaaacggaatatggaggtagagagaaagcggtcgttcagggtaacgggcagcagcctggataaatgctgcattatcatactgttgattgaattccaatgccgtcggatacgaagtataacgagggccggaataattgtatttctggatcaaaggcagatcccaaacgatggcttgctcagacatgctcattccttccgatgtttttgcccatcaaaacgtaacactttcatatgcttaatatgttgcgctatggtggctccgcgcagccgggttttacgccgcgataatcgccacagtttacccaataaccataacaaataacatactattagtatggttattaggatcaacccgcctctgatcatgagagattaaattagttacctttcagcagttgcataatgtcatcctgcttctcttcttcacgctcttcctcatccagtttaatacctaactcttccatcagagcgtcaatccgatccagcgtagtgtcaacataagcatgctcttctttagacagactttcgccattttccagacgctctaacaatgcatccagacgatcgtcgttttccaacattgctaactcttcctgtggcgacagacgtggttttgtctcgactttattagcaacgacaggttttgtcggttgttccccgacgatcagcggaacaggcactttactaccaagacgtggatcacgttgctgtttgcctgacggatgtttatcaccgctctgttcctgattgcggttaccgggcggattgccacgatgttttttctcacgcttacgtgcacgcccttccgcattcaattcttcgcggttttttcttttctgtttactagcggatactttggctggtgcttttttctttaacgggttcatagcctgttactcagtttggtttatcagggtattgctgcgccggaatctagcagaaactgcacgtatagaaaagcgccgtgaataactctttatcttttaaaaaaaatagccaaaaatctcttatcattcatgcatggtttaaccatcaacaaatattctattactcttagctttcaataaatgataaatcgatatgcctatttttgatacttcttgctataaatccgtttacttgtgggtagttggttatgctttgttatggatgatagtgagttattcattcgacccaaccgtcccttatgatgccgtcgaagcattgaactggggaaaaaacggcgaatggggttcacctaaaaatccgtggttagtgggtgtaatgatgctgcctgctatccatataagcggtgtttcattgagtttttactggtatttcattcactttattgctatcgcgattagcatgctcggtgtatggcatctggcatttcgactgacaggaaaaaaagagctggcatggctcgccatgctgacattgaatctgtctggtattattaacttcgatattatcccatataacgataattatctgctaattatgctctggccgtggattatgttgttctttctacgagccgtatatgacaatccacattggtggttggcgtttgcccttagttccgggctggcaacaatgggaaaatattccacattggcattggttggttcagtttttctattgaccctgtttgtacctaaaattcgccaatgttaccgccaacccgcgctttatctcgcactggttatctggtttgtgctggtcctgcctaacttctggtggctgtggaataatgattttgccgccttcaaatgggtaaattcacaaatagatagcgggtttaatttacagaccacccgatcgttattatcagtattttatccactgattatcgttggcattattatttatcagcttggcggccgtattagctggccgaaagagcaaccgaaccgattggtaaacattatcatcttgttgccattactgattatctactgctggttctcattcaatcaaggcggaagaatgacagaatggctgcacccctttatgtctgtttcatcagcgctgttggtcggttctattacccgatttccacaaaaatcattacgcagcactttgagagggttgattgtcgttgcggtattgattttgatgggatatgtactgattatggcagccaatgttcgcggtgccggccataaattcgaaggtattaaagacttttcttggcaactggaacaacgctggcatcaacactattcgacaccgctccattatgtcgggggcgaatacttacatcagtggctgactgtctacgcgccaagtcagccagagactatccaaccttggataccgggaaagcaggcacccaatatctacaaccgccatgttaaagcaagcgatattgtacgtagcggtgctattttggtaggcgaaaaaggtaaaacttgtgaacaggaagattttcacagcgttctgcaatactggccaaaattaagaataagtagcacggaggaattccttttccagcctgaacctgaaactaagccaatattggtttgtgtaggttttgtgtcaccggagaaatatcaatagctttctctgcaagttgaaagccgatttaaccggctttcaacatttcatacgctattagccaatagaccggctaacttagcatcatcctgcatgatgacttgtacatttccattacgtagcgcagctgtcagataatactcgcgcagatactgcacgattgcttggttgggaacgcaatactattacacagaagttaaaagaacccgggttggagtaaggagataatatctccatccctatcaccactttgcggagtttaatatatcagattccccattagcaggattaaataaccgatctcgatcacatttcatactattcattcagacaagaaaataatccctcattagaatagtttattaatgttattattaaactatcaagattatttatgggaagccgttttctttatcaccgacgcctgacagggcttatcctgctgacaatctccgaactggtctatgcttcaacatcgatcagccctgcggatcaagaaaccatcacgcaacaacaaaaagcattgttgcaacaagccgagcagcaacgggaaacgctgcgcaacaacatcaccttatctccatcccctgatgtagcgccgggtacagcagaatctatctgccacaccattcaccggattgaatttgacggtgccaaaagcctgcctctaccgatcaaacagcacttaatacacccttatttatcccactgcttatctttgcaggacattaatacattggtacgacaaaccactaatgcctatattgaacggggttatgtcacttcccgggccggactcaacgcacaggatttatcctccggtattctcattattacggtcaatgaaggcaaagttgaatccgtcagtctggacggagaaacacctctctcgttgaaaatggtttttccgagcatagtgggtaaaacgcttaacctgcgagatattgaacaaggcatggaacgtttgaaccgcctgccttcccaacaaatgaccattgatattcagccgggcaaacaaccgggttattccacggttatcttaaaacgaacgtcgattcgcttacccgttagtgccagtttgggggctgataatagtggtcaaaaaagtaccggcaccgagcaaatcaatgccagcataaatttggataatccattacaccttgctgaccagtggtcattatctgccagccgcaacagtgacttccgcaatagccatcaaagccgtagcctctccgccaatgtgacggttccttacggttactggttattcagttatcaatatgcatggaatgactcttttcagaatatcccggcatgttcacaaacctatcgctacacaggtgacagccagactcaccggctggcagtaaaccggacgttatatcgtgatggagagcagaagctggcattggatatggggctgacacgccgtcgaaccaccaatttactggcgggagagacattatccatcagcagcccgacactgagcaccatcaacctcggcgttaattacagcaccgtgctggcggggagctatgtcacctttaacccgatggtcagccacggtttacaaacatttggtgccaccaaagatgatccgcgtttctccgatgcgccgcgtagtcaatttcgcaaactcagtctgagcgccagctatttcatgcctgtcacagactccgtttattacctctcatcgatttacggccagaccacgccagacaacctttacgccagcgaacgtctctcactggggggacaatattccgttcggggattcaaagagcaatatctcaccggcaaccgcggcggatattggcgcaacgagctgaactggcggatatcagaactgcctatcccaagcgagctcactttaaccggagcgctggatactggctggttacaggaaaaaaccggacaaatcgagggcggcaatgtcaccggtacggctctgggcttatcactgactcaccctagattcaaccagaccatcactattgggaaacccctcattcaccctgatcacctaaaaccggatcactgggtcgcttattggtcagtatcactgactttttaacacttaaattaaacaaaagggatagtacgatgagtaaacgcaacaactcggtggcgagaggcacgagttatcttttaatttacctgacggcaattcagccgctacacccggcgattgctgcggggatcacaccggacaataaccatacgcaggtacaaaaccaaagcaacgttccggttgtcaatattgccacgccgaatgacgcggggatatcccacaacacctataaagcgttcaatgtcgatactcaaggcgctgtactcaataacgccacgcaagcggctcaatcacaactggcggggcaacttaacgctaaccctaatctgcatggaaaagcggcggaactgattattaatgaagtgaccggcagcggacaatctaacctgcaaggccaattggagattttcggcaataaagccaatgtaatgattgccaaccccaacggcattacttgtgatggctgtggctttattaatacttcgagtgcaacactgaccacgggtaaaccgcaatttgataaacagggtgcgttggaagcattggaagttaaaacaggccaaatcaccattggcggtaaagggttagatggcaaggcgacggattatgtcgatattatcagccgggcaacggaattaaatggaaaaattcaggccaataacctgtctctgacacaaggcgctaaccgaatcagtttaaaagacggcacagttaaacctgtcgctggtgaaggcgctaaaccccaattagccgttgataccaaagcattaggtggcatgtatgccaataaaatccgactggttgccactgaagagggcgttggtgttaatctgaaaaatttaatcagtgaccagcgtgatattactttaaacgccaatggcaaaattgaactgggcaatattaaggctaaaacggacctgaatgttattggcaaagaaacccatattgcgcccaatattaacgtgcaggcgggacgggatattattctggaaaataccacgctggataataaaggaagcgtgactgctggccgggatattcgaatatttggcgataccgtgcgaaataacggtgataaagcacttctgcaagccaataataatatgtggatacagaaagatgctcaggggaataaaggtcatctgattgagaataaatctgcgacgataaagacggtaaagggggatttggttgtcaggacccaaaaacttaataatacacgtgatgtttttgttgttaaaaacaaggagttaataccagattcaacagataaaaacctgattattaatgaaacgaaaacctgtgattttggagacccggttattcatgaagctgcattaatcactccacttcctgataaatggtttgggcgtgttgattttggtagagataatactacagatgggggaattcatataaatcacgccagaactgaaaccatcaattctgacagtaagcaacctggagtgatagcatctggaaagagcatttatatcaacagtgatgagttattgaattttgtcagtaagatgagtgccggaaaagatattttcttaacaggaattaattttattaatgaaagcaaaataaccggcgtgctaaataattatattgtatatactgagaaggaaaccgaaggtagtgtgtcttcccgtggcgacgtatatatcaggacagactttgacagatcaggaaacgttaaaacatgggaggatgaaagcaatattattgaacccgccagtgttgttgctgccggtaatcttgtcgctgattttaaagataatattaatattcgcacaccacccccttatgacatcaatgaaatgtcccaaatcaccgttgcagggggttatgatgcgttatctgctaaaaatattgtcttaaattcagggaaaatcaacaacaataatattatcaaagctaataacaacatcacgattttagcaactgacgctgttacattaaacaccggggaagttatttcgggtggtgatgtatccatgatcgccgctaataatattgatgtattgcagagtaaaatcaagggaaaaaacattactgttattagccgtaatgctgatttgaaattgcaaagcaatgagactgtcggatatttcaaccatgatggtaatagaataatcagccgcattgaggcaacaggtgatttattgctaaacgcaggtaagaatattatttttcgggacatatttttaactaaaagtgataatattactttaacggcaaataatgatatcaccattgataataacaatgcggtgctattatcacataaacgaattggcagtattatctctttcattaaagaacaagaactttttaataacatgttatctaaagtgggtaagctggatgcaaaaagttctattgtgattaatgccggtggaaatttatcggctaagagtattcgtttctccgcagaaaaagacatcaatttaacttctgcaaaaagtattgatctggctccccgtgaattatctccttcactgagtaaattattcccttcatcacgttcaggagaattaagcagccaattaaccgcagggaataatatcagtgtcatcagcggtacagatattaacggaaaggcggttcagatacaggcaaacggtaacgtattattgtcctctggaaggaatatcacactcctgcccctgctttactctgctattgcttacaatgacgatgacagacctgagcattatgatgaacataaagatgacagaaattatggcacacaaatccgtggtactaaaaagctgacaatggctgccaatggagccattaccactgtgggttcaaagttactttctgatggtgatataacgattacctctggtggtgatatacgtttcgaatcggctcggaatcacttctacaaagatcgcgctgattatttcaaagataacagcatcacagaaacctatactcaacaaagtactgaattaaccagtggtggtgtgctaaccgtgctttcaaacggcagtattctttttcaggccactaaactggcggccaaaggggcaatggatatcgcggcgaaaggtggctatctgtacgctcaggcgatggaagaatctaaccattatgagaacacagagacaagtcgtaattggtatggcaggaagaaaaccgctaaacgtacccgtcatgatgtcactaataaagtcactgaatttaccgcgggtggtgatattaatctgttaagtcgggatgacagcacttacgaagccagtcaaattgccactaataaaaacgccaaattgaccagcactcacggtaaagtcaattttaaagcggtaaaaaataccgcttttgaacagactattacctattccaaaggcttttatattaagcaaagggataaaggttataccgaagataagtgggttcttccctctattcatattggcggaaaactgaccgtagaagcggctaaaggtgtcagcgcggatatcaaagcgaaaaatggtcagtcattacaaaatgtcctgactgtattggggaatacaccggagaccgcctggctgaaaggactcaacgaaaataaagatacccagtggaatgtggtgaaggatgcttatgacagttgggatcacaaaagccagcatttaaacccggtggtttctgcggtgattgcgattgcggcagcggcagcaaccgcaggcagttctctggcggcatctgtcgcatcttatgcgggtaatagcgttgcgggtggggcattaaccgcaggaatgtcatcactgacggcacaggcggcggttgctattgtggataatcagggtgatctatccaaagcactaaaagtgttgggtagcagcgataccgttaaatcaaccgttacctcaatggcgcttggtggcgcactggcgggttttgataacgtcatgggatgggataaagccgccaatggcgctcaaattgacccggcaaaagcgacattacctaaactgagccatggcgactggagcaaagtggctcaacgggtagcgggtcaatccattatcagttccagccttggtacagccatcaatggcggtagttttaaggacaattttactaccgcattacttgccaatattggcagccagattaacgccgaaggtgccgggttgattggggctaacggtcaggtgttagatttacccggaaaagctatcagccatgcggcggtttctgctcttgctgcggaaattggcggcggtgatgccaaaggggcggcggctggagcattagccgcagaactggccgcgataacattggataaaacattcaatgatccaatgaaaattcaggcaggtggcaaaatcattggcagcgtcgcaggggccattgcgaccaacagcgccaaaggggctaacagtggagctaatgccggggaaattgttattctctttaaccacctgaactccatgaatgcctacaatctggtcagagaactccaggaagccaataagcaaggaacgcctaccgaagcaatctggaacaaatacaacaaactgagcgctacacaacgggcagaaatgttgtctcactgtgccgggaacggtgggttatgcacactgacctatcaggctgaaatggaaggaggaataaaaacagcggatgccatcagtggtctgagatggatgtttggcttatcagaagaagattcccatcgtatcagtcagtttgtgacgacagaaaaccagaacgatttagggctgttgtataactcgttgccagcttgggaaaaaggtgcactgatagccaaagaggcggtagaatctgccggtattggtggtgccatcggcggtaaagcttcggttgcttcgattgttgggaaacacagaggaagcgcaataccagtactggagccaatagtcgcttctaatgggctaacttacaaatcaaaccctaaacacactcttggtcagcaaggtaatcgacccaatgcaggaattgaacctaagggctcggtggatttatttagtcattctatttcttctgcttctaaagaaaagcaaagatattccattgattctgaaaaaaatgttcatcgcttttcttacagtaatgatggtacatggcattggtctggtagtactggagatcaaaaaaatccattagacagacaagaaattcctaatgatgtaaagaaaaattttggtttacctggtaaatggagatagaaattatgatttttggtgatccatatcgttttgcgatattagtagaatatattccctattggagtgatagttcatttaaaaatgggttattccatttttatattaatgggaaaatgttccctgatgaactaactaccgcaacattaaatgtggatgttttttctttagatgaaaaaaatgcattagtttcttttcctgaaaataaagagctatttgataaagaaattaaagaagcatttaacacgatgttaggtatgatatctcctaatctggtagatagtaacctagatgtgccagaagattttgaatcgtcatatatttataaagcttcaacagagaatattgatgattttggtagttctgtatttgctgtatcttacgatgatattgttagaatcatcggagcaaaacgacgtatcttaagatatgataataatggttgtggttactgggaagatattcctaaacctgatttctatgaaacaaaaatttataaagatgaagttaaagaaataatttccaatataaaaaaatattatatatcattgtaatatagtctccatatataaccccaactacagttggggttatttggaatggcagctccggagatattaacaatgccttaacaagcaaacaggtgccaagtgatattcagaaaaatctaggagtgaaactaaaatgatttatggtgatccatttttattttctcttcaatttgacattgttgatgttttcgaattaagaacaacaattgacttttactcaaatatgaaaatagatgagttggcatgtaatgatattccctttgatcctattaccttatacagaaatgcagaaagttattttacaggagaaggagaagatcttattgatggcttgtttgatatgacctgtactgcaatgggggataatggctattatatttactttatgaaaacaagccaaaatgattgcctaatttgaagtgttgatgatgggaatacaataaaggagacattattacctgctggtacagttcattctgtaattcaaaaaatgtcacaatgcccattaactgaaatatttactagtaacaagaaaataacaatgaagcaaaaattatttggtcaaccatatgatgaaagtaatcctgagtggattctgaaaggttattttgatgtgatgtaccaaaaggggaaaaattatttttatgatgttatagaaaatattataaaaagacatggtttttctacagatggtgcctactgtaattttccagatatgaatagtttttttgaagaagaacattttgaaggggttgagtttacatggggctatccaccagaacaagcaccaacaataattgtaagcgaagcaacctgtttcaaatatgtaaaactagcctgtgagaaatatcttcaattacatccagaagatacagagcaagtaaaatccttacttgttcaactcccttaaatcagaatgatcctagcattgaatgctaggatctttctcagtcggttgattaaacacacattcaagcaagccctgagtgttttcagggccgggaatcgacatattcatgagttatctgttccaaaaaattgcgaaattttcgatctttcgtataacagacagagaacggagaacggagaacggagaacggagaacaaaagacagagaatataagtatatcaagtcagaagaaagatcagagttatcgtaatattttacttattttaaaggctaattaccatcatattatctaaaaagattatttattctgttattttaatattctttccttattctcataaagttgctaattaaaattaaaaatccccctatcgttaaaatagggagattatgccttagataaagataattaagtaaagagaaaaactaatattggggagccaaaactaatttttctttccgccagaaacggaaaaacgatattttcctacgctgtagagtaaatcggcgaacaagatagtttgctgtcaattccaatgccaaacacatcacgaaataaattaacgcgacaaataaaaagacttctgtcgggtaaaccatgctgcggttattaacctgagttgccagaaatgataattccgccacgccaacaatataagccagagaggtatcttttatcagcgcaatccactgattaataaaggaaggcaccatcatacgcaacgcttgtggcaatacaatgtaccaaagtacctgccaacggttaaaacctaatgatagccctgcttgccactgaccggctccaatcgcaataatccccgcttttaccccatgagccaaataagccgatgtgatcaacgccagagcgcaaaccaccgtggtaatttctggaatttccatacccagcatcaccggcaacaggaagtaagtccagaaaatcagcataatgactggaattgcacggaaaaagcccaataccgcagctaacaggttaacccaaaatcctttcagcattgccaaagcaataccggcaactgtacccaatacaatagaaatcgtcccggctatcaggctaataaccaatgtcaacgccgccccttcaagaggaccatcaggaaatgtacctaacagtagatagcgccagttttctgcaatgaccgaaaaatccattctaatgtcctctcgttatagcttgttgttgacgccattgtccccaaccttccatgacggcaatggtggcgatatacaacaccgttgcaacaccgaatgcttcaaacgtttttaatgtttcggtttctacttgacgggaagcatatgacaactcagccacgccaattgccattgtcagtgacgagtttttcacaatattcatatattgccctagcaatggcggcgttgcgattttcaacgcttgtggcaataccacataacgcattgcttgccagccagtgagtcccagtgcatgagctgcatatttttgcccgcgccctataccctgaataccggcgcgtagctcttccgccacgaatggcgctgaatagagagtcaaaccaataaatccagccaaaaattcgaatgaaggccaggccaatgatagacctaacagattgatttcatggggtgtattcagccaaaacatcacctcttgcggcagtatctgccctgaggcgaaataccagaaaaacagttgcaccagcaaaggcgtattgcgaaatagcgtggtgtaagcggttaccagccaacggagaattttcaattggctgtcacgagcagcagccagtacaaaccctagcaaggtggaagcgataacggtacaagcggatatccacaatgtaatcaggaaaccttgccaaagccatcccaaatattggggagcaagtaactgttctgtaacaaataattcaaacatatcttactattaccaggtattaccaatgacaaagccccgcaacaaaaggcgaggctaaaattatcaataacttactactcattaagactgagtttgctgctccaaaggcgcaaacttaaagtcacctctcggttgagccgatttggtttccgggccaaaccaacggttataaatttccgctgcttcaccctctttttccaatttcagcaaagtttggttcaccgcctcaaccaagcgctcttgtcctttcgccgcagcgactgcctgatattcacgggtgatgctaaaaggagagatctcaaattcagctttttgggcttccggtacattagccaacagaccgactaacttagcatcatcctgcgtgatggcttgcacattgccgttacgtagcgcagcaaaggccagaggtgtgtcgtcataagagatcactttggctgtcgggtaatgctcgcgcagcgtaatttcctgtactgtgcctttatcagcaccaatacgtaagtttttaatgtcttcgggcgattttaaaatacctttacgggcaataaatttttgcccagtagcaaagtaagggattgaaaaatcaacttgtttagcacgctcatgagtgacggtaaagttggcagcaatcaagtcaactttctttgatgccaacagaggtaaacggtttgctgggttagtcgggcgcagttccaatttaacacccaagtcattggcaatcgcgtttgcgatatctacatcataacctgccagttttttggtttgcgggtcaataaaaccaaacggaggattactgtcgaaaacagcgatccgcacggcaccggtttttttaatatcatccagtttatccgccttcgcagcaccagtaaccagtgttaacccggccaataacgccgtaataacaacgcgagatttcattaaactctcctgacaacaattaattctttattaatcacaagctatcaatttcactatagtgcatgaaataatataaataactatatttataactatcagcaattataagataaaaaaaatgccggtaaaaataccagcattcagactattgaccaagtggtcagcgagctattcgttatcttttgtcaacagcttttccagttcatcaccacctacatgccggaaatcctgccctttaacatagtagaaaatgaattcacagatgttttgacaacgatcgccaatgcgttcgatagaacgggcacaaagcaggacggtcagtacactggggatggttcgaggatcttccatcatataagtcatcaactggcggacaataccttcatactctttatccacctttttatcttcgtgatagatacgaatcgcttcttccagatccatgcgggcaaaggcatctaacacatcatgcagcatctggatggtatggcggcccagggattccaagctaaccaacaggggttgatgctgatgtgagaatttctcaagtgccgtctggcaaattttatttgcgacatcaccaattctttccagttcagcaattgttttcgaaattgacataatcagccgcagatcactggccgttggctgacgcttagctatgatgcgaacacacgcctcatcaatagccacttccatcatattgaccttatggtcatcctcaatcacttcacgcgccaatgcagcatcctgattatgcatcgcggtaatggctttagagagttgttcctccaccagcccacccattgccatcagttcagtacggacatgtgccagctcagcgttaaactgaccagaaatatgtttgttgagattcagattgtccatgttacgccccataatcaaccataacgaccggtaatatagtcttcagtttgtttcattttcggtgtggtaaacaatgtgtctgtatcactgaattcaattaattcaccaaggtacataaacgcagtgtggtctgaacaacgcgcagcctgctgcatattatgagtcacaatcaccacggtatattcagatttcaattcgctgatcaactcttcaattcgaccggtagaaatcgggtcaagggctgagcaaggttcatccaatagcaaaacttctggccggatcgcaatgccacgcgcaatacacaaacgttgttgttgcccaccagatagactgtatccgctctgatatagcttatcccgggtttcactccataaagccgctttcgtcaaagcccactgaacacgttcatccatttctgctctggagagtttttcaaacagacggacaccaaacgcgatattgtcgtaaatagacattggaaatggcgttggtttttggaataccatgccaacgttggctcgtagcagcgccacatcctgtttatcagtcaggatattcttaccatccagcagaattttaccttccgcccgctgttcaccatacagttcatacattttgttgaaagttcgtagtaacgtagacttaccgcaacccgacggaccgataaaagcagttactttattctttgcaatattcaacgttatgtttttcagcgcgtgaaatttgccatagtaaaagttcagattgtggacctgaattttgctgctagcgatatcattaactatgttcatttacttctctctgttgaaaatatcggtcagtgctttttcttggcaaacagcacacgcgccacaatgttaatcagcaatacacacagggtgatcaataatacgccggcccacgccagttgctgccattcggagaatggactcatagcaaatttaaagatggtgaccggtaagttagcaattggctggctcaggtcagtactccagaactgattggaaagagaggtgaacagcaatggcgctgtttccccagcaattcgagcaatcgccagcagcacaccggtgataatgccggataccgatgctttcagcgtgatggctgaaatcatcttccatttcggtgtacctaaggcataagcggcttcgcgcaggctatcaggaaccagttttaacatgttttctgtggtcctgatcacaatcggcacctgtaacaacgccaaagcaatcacccccgcccaaccggaaaaatgctgcatttttgtcacaacgaccatgtaaacaaataaaccgacaacaatagaaggggctgacagcaagatatcgtttataaagcggatcacctctgccagccatgaccggcggccatattccgccaaatagatacccgccatgatccccagaggcgtaccgataactgtcgcccacaggatcagtaatccactgcccacaatggcatttgccaaaccaccaccttccgtattcggtggcggtgtcatttcggtgaacaacgccagtgacatgccgtcgaaacctttggtgacggtagaaaacagaatccacaccaaccaaaacagaccaaacaacatggtcgccattgataacagcagagcgatgcgatttttttgacggcgccatgcctgtttacagctacgtacattagcatcaataggcttttgtctgtctatcgttgccatatcagcgcccctcattcttcgccaagcgcataatcatcaattttgataacgccagcacaataaaggtgatcacaaatagaatcagaccaagctccatcaatgctgcggtatgcaagccagattctgcttccgcgaattcgttcgctagcgcagaagtgatgctgttacccggcataaacagtgagaaactatcgagctggtaggtgttaccgatgataaaagtcaccgccatcgtttcccccaacgcacgaccaaggcccaacatgacaccaccaatcacgccatttcgggtgtaaggcaacacgatatgccagataacctcccaagtggtacaaccgataccataagccgattctttcatcatcaccggtgtttgttcgaaaacgtcacgcatcaccgaagtgatataagggataatcatgatagcgagaataacacccgccgccagaataccgataccaaaggcagggccggagaacaattcgcccacaatcggcatactggcgaggagattgccggcgggctgctggaaataggtggcaaatagcggcgcaaaaacaaacaacccccacatgccatacacaatacttgggatagcggccagtaactcaatggcgataccgagcggacgtttcagccagttaggtgccagttctgttagaaacaaagcaatcccaaaactaacaggcactgcgataatcagcgcaattagcgaagtaaccaatgtaccgtaaatcggtatcaaggccccaaattgctctgccggggcatcccacgttttctgccagaggaaagagatgccgaactgctgaatactaggccaggaggcaataatcagcgagataatgatgcctcctaacaaaaataaagttatcagcgcagctagcctaaccagtgcgctgaaaataatatcgccatttttactgggtgctttcattgccgttttttgttcggccatagagcttattctcattcggggttaactccccccttaaacggggaagaaattaaaacgacaaatttaatcgatatttaaagcaatcgatatttaaaacaatcgatatttaaaacagtcactatcaacacgacttaatacagggccttgccattgctatcttttatctgggttttccaagccgcacgaacttgctcaatcacctctttaggcagagttgcataatccagatcgtttgcctgtttactgcctttctcataagcccagtcaaagaatttcaatatttctgcccctttcactgcatctttttgctgttgatgaaccagaacaaatgtagtggaagtcatcggccacacattttcaccttgctggtttgtcaaatcctgagcaaacgttttatgccattctgctttcttcgctgcggcactgaaactctcttctgtcgggctaacaatgttgccattagcagataccaatttggtataagccagatgattctgtttagcgtaagcatattcaacataaccaatggaacccgtcagacgttgaacaaatgcggcaatcccatcattacctttaccacccaaaccaataggccagcttacggtggaacccacgccaactttttcttgccacgctttattcactttagagaggtagcgagtaaatacaaaggaagtaccggaaccgtcagcacgacgtatcacagcaatatcttgttccggcagtttgactcccggattcaattgagtaattgctggatcattccactttttcactttacctaagtaaatatcgcctaaagttttaccatccaatgtcaattcaccagatttaatccccgggatattaaccgccagtaccaccccaccgatgacggtcgggaattgaaacaaaccatcagcagctaacttttcatcagataaaggggcatcggaagccccgaaatcaacggtatttgccagaatttgttttacgccaccggaagaaccgatgccttgataattgactttattacctgtctctttttgataagaatccgcccacttggcatacaccggtgcgggaaatgtcgcacctgccccggttaaactagtggcagcaaatacaggcagggttgtcaaagaaaacgccgctgccattatgccggttacggtggtacgcatcagtttcataatccctcctaatgggatattgagaatcaacaaagaaatgtatacccgttatccttcaagtggcctctttgttggctgcactcgctcaccccggtcacatagttcgctatgctcccggggactcgctcccttgccgtcgcgatgcatcttgaaatccatagggtatattcgtcaaatcaaaaaaggtgcaagaggaaaataggtcaatttaattacagcaaaatgtcttaattatgacatttttatgatagcgcaatcggcacttaacctgtaattgacataaaactgtcatctccacacaccataaaaatcaaatataggagatgattatcaagccgttaaaaattatcttccacaacaggaatacagacacggatagataatccccctctgaggctggtgcccatttcaattttcccatcatgagcatcaataattcgctgaacaatcgccagacctaaccctgttccactgctgctgcgcgctctttcgccacgaacaaatggctgaaataaccgtggcaaatcttcctgtttgatgccggctccattatcttctacctgaaaccaagcaaatttatttgtctgaccactactcactttaatccagccgttaccataacgattggcattaaccaacagattagccaatgcccgtttaatagaaatcggattggcgttaacggttattgggtgaagagacagatggttttcaatatcctgttcatagccattctcggcggaaataacctctttgagaatagaattcagttcacaaaactccattggcatttcctgcccggtacggagatagtcaatgaattgctcaataatggcgttacactcttcaatatctttattgatagattcagacagataagtatcttccttgctcatcatttctgttgccagtcgaatacgtgtcagcggcgtacgcaaatcatggcttacgccggcaattaatatcgtgcggtcactttccaatagttttatcccggcggacatttggttaaatgcgcgaatggctgcacgaacttccagagagcccgcttcccgcaccgccggcatcataatacctttacctgtttgcctggcggcatactccatttccagtaaaggccggttctgaaaacggatataaagccagatacaaccgaataccagtaatagaattgccagtgtatagcggaaaataggagagaattgattttgttcgatctcagtcaaaggaaccctgacccaaatatcgggggccaaataagaattaagccaaagtatagggctatctgtgtttatttccagacgaagatcagccttgccaccaaggtactcgcccatcttctcactcaggaaatcataacgtctggcccaacataaaccttgtatctccgcatcagattcagaatagagcgtaatacccaattcctgataaatctcccggcgaactaccggcgatatcaccagaaaagagccatcctctaacttcaatttttcagccattagggtacgaacttcatacgctaataccttattgaactgctgcaaacttggcataataacgaaattcacaacaaccaagtagctggttaccagactgataaacagcatagccataatcaggaataaagtatgggtaaacgtgctgcgaggggagaatcgcaataatctcatacacgaattccgtctggcacaaagacatagcccagaccccagatagtctggatatagcgaggatgtgtaggatcttcttcaatcacacggcgcagacgtgaaaccaagacatcaatcgatcgcttcatcgtgctatattcccggccacgcgctaaattcatcaacttattacgggacagtggcacgccaggataagaaaccagtactttcaatacagcaaattctccactggttaattgaatatgttcatctccctgaaacatttcccgcgtactcaaattgaggctaaacttaccaaaattaataatcgcatcatcctcagccggtaggcccaataacttattcgcctgacgacgtaataccgcccggatacgcgctaatagctcacggggattaaatggcttcggaatataatcatcagcaccaatttccagcccaacaatacgatctacctcttctcccctcgcggtcaccataataatcggtaccggattactttggtttctcagcctttggcaaacagaaagcccatcctctcctggtaacattaaatccaatacgattaagctaacagattcccgtgtcagtaagcggtccatctgctccgcattagcagcactacgtacctgaaaaccttgttctgtcagataacgctctaataacgttcgtaaacgcatgtcatcatccaccacaaggatcttgttatctacttgcattatcaaactccaaaaaacactacatgctttgataaatttatcattttgaaagagattaacccaaagatagaaaccagatatctgtattttgagactattcctaataggacttatttccacggttattaattcgaatgattaatttagtggtttattactgacaatgagaacgcagtaattcactgtcaactatcgaatttctaccgttattttgccatccaccaatccatcaattagcaccctggtgaccggcaaatcgatagaaatctatttattagcgggattaaattcatcaggcagactaaacgaaaaatgccctttgctgcatattatctgcttacctccgccacggttttcccttactaacgaggatctggatcgataatgttcagctcaccaacgtttgaacaagaaatcacgcgacggtcgaattttcgtcacctttcctgactatagtaaacaatttcgcttgttttttcttcacttaaaccttaacagcctgtttcatcaccagcaagattcacagcatacatactattcagtacacagaaccataaattatatgatgaacgttataaatattagagccaaatatcataatgagcagacaggtaaagcaatcttgttaccgataatgactaaaaaccgagtcttaatttgacatcgaccaaaatgggctgttttatataccctatggatttcaagttgcatcgcgacggcaagggagcgaatccccgggagcatagcaaactatgtgaccggggtgagcgagtgcagccaacaaagaggcaacttgaaagataacgggtatacacttatatgagattaactacggtatctacatcaagataaaatgaaaactaaactgataacccgtgaaggctacaacaaattaaaggaagaactggattatctctggcgtgaagagcgcccagaagtgactaaaaaagtgacttgggcagcaagcctcggtgaccggagtgaaaacgcagattatcaatataacaagaagaggctacgggagattgatcgcagagtccgatatctaaccaaaagcttagaagaattgcggtgtgttgattactcccctcaacaagatggacgagtgttcttcggtgcatgggtagagatcgaaaatgatcaaggtgagattaaacgcttccgtattgtcgggtacgacgaaatttttggtcgcaaagattacatatccatcgattctccaatggcccgggctttattgaagaaagaagttggagacagtgcaatcgttcatacaccaacaggaaaagtgttgtggtacgtgaatgagatcgaatatacgaaatagcccattaaaaaatttaaaatgggtagattcacataattaagtgcaacattgttaatctggaagtaaacatgttcgtattccattaaataaattttttaagtaattcctccatttttaacgaaaatcaaaagtagatttgtaattaattagttacctgcttctggaataatgcgatgaaactcaagtttttcctattctagctatccttttagtttaattctgatattcggaaacagctcatagcaaatccggtaacccacttagggttccagcgacaacttttcacatttgagttcaatcgcggttgctatagcgtaactcgtcaaaataagattagacgtaaactggaaattatttctctcagaacgtataaagaaggctttatgaatatttaaagcttatccaccagaagaaaatgcaacatgaatgaatctctgagccaaattattgcaagtgagctacaggcgcagccacaacaggtactttctgcgattagcctgcttgatgaagggaatactgtcccttttattgcacgatatcgtaaagaggtcaccggcggtctggatgacacccaacttcgccaacttgagacccgccttagttatctacgcgaactgtcggaccgccgccaaaccattcttaaatccattgacgagcaaggtaagctaaccccagaactgaccgaagccattaatggcacccagagcaaaacagagctggaagatctttatctgccatataaaccgaagcgtcgtacccgtggacaaatcgctattgaagccggtcttgaaccactagcggattccttgtggcaagatccacagcaagaaccagagcaggttgccactacctttgttgataccgataaaggtgtagcggataccaaagccgcgctggatggtgcacgttatatcctaatggaacgttttgccgaagatgccgcgttattggcgaaagtacgtgactatctgtggaagaatgcccatttggtcgctaaagtcgttgccggaaaagaggaagaaggcgctaaattccgcgactattttgatcatcatgaacctatcgcacaagtcccttctcaccgcgcactagctatgttccgtggtcgtaatgagagcatactgcaactttcgctaaatgctgatccccagtttgatgaatcaccaaaagagagctattgcgaacagattattacgcagcatcttcatctgcgcctgaataatgcaccggcagataactggcgtaaagccgtcgtaaactggacctggcgcgttaaggtattgctgcatcttgaaactgaattgatgagtaccttgcgagagaaagcggaagatgaagccatcaaagtattcgcccgtaacctgcaagatctattgatggccgcgccagcgggtatgcgcgcaacaatggggctcgatcccggtctacgtaccggtgtcaaagtagctgttatcgatgcaaccggcaaactgattgccacagacaccatctatccacacaccgggcaaacggctaaagctgctgcaagcgtggcagcattgtgtctcaaacatcaagtggaactggtcgccatcggtaacggaacggcttcccgtgaaacagaacgtttcttcgcggatgtgcaaacacagttcccagagataaaagcccaaaaagtgattgtcagtgaggcaggagcatctgtttattctgcctctgagctggcggcacaagaatttcctgatctggacgtttcactccgtggagcagtctctatcgcccgtcgcttgcaagatccactggccgaattggtgaaaatcgatccgaaatccatcggtgtcggtcagtatcaacatgacgtcagtcagagtcagcttgccaaaaaattggatgcagtcgttgaggattgcgtaaacgccgtcggcgtagatctcaataccgcttctgttccactgctaaccagagttgccgggttgacccgtatgattgcccagaatatcatcaactggcgtgatgagaatggccgtttcaataaccgtgcacaattactgaaagtcaatcgtcttgggccaaaggcttttgaacaatgtgccggattcttacggattaatcacggtgataacccgctggatgcatcaaccgttcatccagaagcttatccggtagtggaaaaaattctggcggccactgagcagaaactccaagaattgatgggtaaccctatttcattacgtggattacaacctcaggacttcaccaccgagcaatttggtgttccaaccgttaccgatattttgaaagagctggaaaaacctggccgagatccacgcccagagtttaaaaccgcgactttcgcggaaggtgtagaaaccatgaatgatctgcatccgggaatggtgctggaaggtgcggtcactaacgtgactaactttggcgcatttgtcgatatcggcgttcatcaagatggtttagttcatatctcttcgctgtccaatcgctttgtagaagatcctcacaccgtagtaaaagcgggtgatatcgttaaagtaaaagtgttggaagttgatctgaaccgcaagcgcattgctctgaccatgcgtcttgatgagcaaccgggagaaacccactcacgccgcagtaacaataacaatccacaaactgaccgccgccctgaacaaaataacaggaaccgtaatacttccggttcttctacctcagccggaaacagtgcgatgagtgatgcactagctgctgcatttggaaaaaaacgttaagattcctatcactgtaaacagatgcactgcttcggcagtgcacgtctcatagttcctgccagaaagaatccaaactcacagattcatatcaactctgagtgactaagtgattaaattaacaccaaaaatgaaaataggattaacattgaaattaatgttggttattattctcatttgcaattattatgaattggatgcaaatcatacttcataataatgagtatgactcattttcgatattataccctacggatttcaagatgcatcgcgacggcaagggagcgaatccccgggagcatagcgaactatgtgaccggggtgagtgagtgcagccaacaaagaggcaacttgaaagataacgggtatatcttacttatcacatatcccggaaggtcatatgcaacttcttccagaccatagttacaagatcattggtttttcgccgaagatcagcccggcttaccgacaaaaattgctgtcattaggtatgttacccggttcttcttttcatgttatccgcttagcgccttttggtgatccgatacaaattgagactcgcagagtcagcctaattctgagaaaaaaagacttggaatttctcacattagacagcgttcaatgcaacgcataatccgttgcaagcaacgaaacggttactcctaatctaatttggcaccaacaacatgaaagcactgaccattggcttaattggcaaccccaatgccggcaaaacgacattatttaaccagcttactggcgctcgccaacgtgtaggcaactgggctggcgttacggtagaacgaaaagttggccgttttaccactgcggaccataaaattgagttagttgacctaccgggaacttactctctgaccacgatttccgaacaaacatcactggatgagcagatagcttgccactacatcctgagcggtgatgctgacatgctgatcaacgtcgtagatgctgctaaccttgaacgaaatctctatctgacgttacaactgttggaattaggcattccatgcatcgttgcactcaatatgttggatattgctgacagtcagcatatccaaattgatattgccgaactggaacaacgcctcggctgtccagtcattccaatggtttcgactcgtgcaactggagtgaatgagctgaaacgggcaattgaccaccataagcagaatttcgggcagtcactgattcactaccctgattgcctgttgcaagaagttgagacgttatctggtgtaatttcagacaattttcatgctcaacaacgccgctggctagcgcttcagatgcttgaaggggatatttacagcctggaacgttccggccttgctacctcaatgctgattaaatccaaagaacgtttgcaacaacagcaacatgaagagcctgaactggtgattgccgatgcgcgctatcaaagcatcaatacattgtgcatggccgtgattgatacccaaaaagccatgccaaacaaactcactcaggcaattgacagaattatcctcaatcgttggttaggtgtacctattttcctggcggttatgtatttaatgttcgtgctggcaattaatatcggtggtgcgctacaacctatctttgacagtggttctgttgctattttcattcatggggttcaatggcttggtcataccttaagttttccagaatggctgacgattttcctcgcacaaggtctcggtgggggtatcaacacggttttgccgctagtaccacaaatcggcatgatgtatttattcctctcttttcttgaggactccggttatatggcgcgggctgcgtttgtcatggatcgtctgatgcaagttttaggactaccgggtaaatcgtttgtcccgttgatcgttggcttcggttgcaacgtcccatccattatgggggcgagaacgctagatgcgccgcgtgaacgcttaatcacgattatgatggcaccctttatgtcttgcggtgcacgattagccatctttgccgtatttaccgccgcattctttggcaaaaacggggcaaccattgttttttccctttatatattgggcattgtcgtcgctattctgactggcctgatgttgaaatacaccattatgcgtggcgaagcttcacccttcgttatggaactcccggtttaccatattccacatctaaaaaccttgcttctgcaaacatggcaacgtctgaaaggttttgttatccgtgccggtaaagtaatcgttatcgccagtatgtttattggtgcactcaacagcttctcattctctggtaagacagtggatagcatcaaccaatccgctctggcttcggttagcaagattattacgccagtattacagccaattggcgttcactcagataactggcaagcaactgttggtttgataactggtgctatggcaaaagaagtggtagttggaacattaaatactctgtataccgcagaaaacattgctaatgaaccgtttaacgcagatgagttcaacctgtttgctgagctgaaagatgcagttggtgaaacttgggatagtttgaaagagacattcactctgagcgtgctgaccaacccaatcgaagccagtaaaggtgacggtgaaatggatagtagctctatgggaacaatgagtgccaaatttggctcctctatttcagcttacagttacctgatctttgttctgttatatgtgccttgtgtctcggtgatgggcgcgatcgctcgtgaaaccagccgtggctggatgacattttccattctgtggggattgaacgtggcttattcaatttcagccctgttctaccaggtggtaactttctcacagcatccacaaagcagcctgatcatcattttgaccgtcgttctatttaacgcgctggtattctgcttcctgcggcgggcacgcagccgtgtgacgatgaagttaatcagcaacccgggaaatagttgccactgctccagtggaaactgtcactaggaattgaaaatgattagcctattacaagtaagggatgccgtcgctctgaatgggcgagcagatgctaagttgttaagccaccagctttctgcttcattatcgatggtagaagcgatgcttgaacaactcaccgtaatgggcaaactggaaaagctcaatgcaactgcctgcctgagtggcagttgcaaacagtgcccggaagtacagcaatgtgacacggtggtttatcggatcgctgggggatactgagccatattatagaatggctaatcatatatagttaatctgagacaactcccctcttttaaaggggggcttatcaacaatctgttggtccaaagagtcataagccataactaaacacatacaatctattgacttacaggcatttggaaaataaatcttcctccaagcgcggcagcatagcggcttaaagtatccagatttggcacacttttaccattttccatacgactaatattttgcttctgagtgccaatcttctgagcaacatcttgttgagtaagatgtaacgctttacgtgcatctttcagctgtttcatcaacgccttacggatctggatatcgttatatgcttccagagtcgcggcatcttctaagagaagcgttttggcttcagaaaacgggataatatcataatcattatcagacatttttaagactccgtttaacctcttgcattcgttggtttgccagatcgagcgatttcttcggcgttttttgggttttcttttgcagtatatgaacaacataaaactgttgtccaactgcaaaaaagaaaaatccccttgcaataccctcagaagcgctcactcttaactccttaagcccgtttccaatgtctctgactttaggctcttttaaatctgttccagcagcttccaattcttcaatggcttcaatcattgaaactttgagaccaacaggtagcttagaaagctccttgagcgcagatatactcccaataaaatcactcaaaaaattatgcgtaccaacagcattcacgcggcagacgctttacctttccaaatcacgccaataaaaatctgttatctcatcgaccttgcaatacttctctactagcaaattcagtcaacaatccaacaaactcatccggatgagaaataaaaggcgcatgagcggcatggcgcatcatggctgaaactgaacgcggccatttttcatcaagaatgttgataatttttcttggcaccaacccatccagataaccgtaaatccgcaagaacggtatggcaagctcagccaaaggctgccttaaatcttcggtacgcaaaatttccaaaccaacatgcagcacttcaacagaaggcatcggctgcgccagcacaacagatttcagtaatcgcgcatcttgacgagcgctgtcagtacctaatgtctgtaaagcaagaaaacgctcaactgtgcgctggaaatctttactaagctgatgttcgaaatcgtgcaaaacttccggcttaatccccggccagtcactttctgcgctgaaatgtggtgaagaagccacggtaattaatccggcaactttatcctgatggtcaagcgctatccggctggcaaccagacctcccaacgaccaacctagccatagcgcattttcaggcgcatatcgccagacttcatccgccatgtcagcaagattcatcgggccatatttctggctacggccataacccggcaaatccaccagatgcaaacgaaaatgcggagcacatcgcatttcaatggaacgccaaacttccgcattcagcccccatccgtgcagcaacacaagatcacgcgaaccttcatcagaagtctgccaaaacagatcagccattgttattctcaactttatttgccatcaaggaagaagtctatgctaacaatggttgggtactgttggctatgccatcagcctctttggtttccacatcatggagtatgcagcttttgcaacaagcggctgaaacgtttgacaaacatgtgcccgtgctgtgcactaccctcggaactcccttcactgccttgtgggcgctgcctcaaaaaaccgcctctatgggagaatatgatataccctatggatttcaagatggatcgcgacggcaagggagagaatccccgagagcataggtaactatgtgaccggggtgagcgagtgcagccaacaaagaggcaacttgaaagataacgggtatagcgattaccgactattgcccaccattgagcggcctgatccgccgctataaatatcactagagaatagattaaaagatttaagtcaaagaaagtgtaaaatgaaaaataattaccattgttttatataggcacgctttacaactagaagtataaaataagaaaaggaaattgcgacgataagaatgagaaaaatataaggggatttataatatgaaattaaatatcccatcagaacaggactgacagctgcacccaaactgcctaggttttgtattgcgaagtaatgcccccttaacccctcaggtgctatactgtcagtaagcgcgtaaaggacggggataaaaatgatctctcccaacgagaaagaaaatattgcaattatccaataaatcaagttctgttcagaatagataaaacccaaaataccgaggatacaaaatatgggccttccgtttcataatgaagttcatggcatcagtattgaaggaagggaagcggtgtttagggaaggtgatttctcaggttctcttcaggaagtaaaaaataatattataaaatatggtaatatcagttcctgtacatttattaaagggtggtttgaaatatccttggctaattggtcacgaccaatagctgcaatctatctggatgtcgatcttcaaaaatcaactcgcgactgtctcaaatatctatatccatggttgacaccaggtggtagtctttattcacaagacggccacttaccacttgttcttgatgtttttgaggatgtgaatttttggctcaatgaaataggtactctgccacctatagtagtgggtatcaggaaaaagaaactaataaaaataacaaaacctgatacaccttctctaccactactttaataatattccttcaactgccaatacggaatttatatcgtttacctatccatataagcgtgcccgggataacctcaatatttttaatttcatcatcttctttacttttatcaacacgaacagcccctgaacgaattaatcgccttagttcagaacggcttatcgctggcaaggctactgaacaaagatccagcagtgttatataagagccttttggtaaaatcaatacatcatgatcagcctcttcaggtgtccgcttttgtactacacgctcaaaatgctcagtggcctcttttgcagatatgtcatcgtgatatcttttaacaatattataagcgatatcttttttgatcttcattgggttaaggcccaattctagttgactgactatcgcagattgtttttctgcctccatgtctgtagcaagtgtcaaataattgataatgacactgtcaggaattgacattactttgccatacatatcatttgcattatcagttaacccaatataattattttttgacttactcattttttcaatgccatctagcccttctaataatggcattgttattactatttgcccttttttctcataggcttcttgaagtgttctccctaccaagttattaaataactgatctgttccgccaagctcgatatcagcatcaatcataactgagtcatatccttggagaatagggtaaataatctcatgcaaatggactggtgcttttgattcaaatcgggttttaaaatcatctcggtgcatgatttgtgcaagagtgattttagagattaactttatgacattactgaatggcatattgttaaaccattctgagtttttccttatttcaatattttcgatatttataacttttgcaagctgatttatataagtctgactgtttttattaatttgttcaggtgttaatggaggacgaagcttatttctcccggtcgggtcaccaattccagccgtaaaatccccaatgataacaacaatccggtgcccttcatcctgaaaatctttaagcttttgtaatacaaccgcatggcccaaatgcaaatcaggtgcagtcggatcaaagcctaattttattgtcagttttctattttcttgtcttgcaagagcaagtttatcctgtaaccctaagggtggctccataattgcgatgtttgaaagcaacttatcaatattctctttcatataggtaacctaaataattacgtttattaacgatgaataaaacaactttataccatgtttataacaatctctattgtcaagtaaataattattcattctggtcttgttgcattaacgacgatgtagtatgcaaaaatatgtcgtttgttttttaattaggtcgtcttgtcctctttcgtgatgcaaacgaaaatgcggagcacatcgcatttcaatggaacgccaaacttccgcattcaacccccatccgtgcagcaacacaagatcacgcgaaccttcatcagaagtctgccaaaacagatcagccattgttattctcaactttatttgccatcaaggaagaagtctatgctaacaatggttgggtactgttggctatgccatcagcctctttggtttccacatcatggagtatgcagcttttgcaacaagcggctgaaacgtttggcaaacatgtgcccgtgctgtgctctaccctcagaactcccgtcactgccttgtgggcgctgcctcaaaaaaccgcctctatgggagaatatgatagcgattaccgactattgcccaccactgagtggcctgatccgtcgctataaatatcaccgcaccccacaacttgcgtcagttctggcgcgtctgtttctgctgcactggcaacagggctatcgtgatggaagatggtataaacccaacattctgctcagtgtgccactgcatcgacaccgacgatggaaacggggatttgatcaaagtgtattaatggcaaagcagttatcagaatggctacaatgcgattaccagcaaagctttctacagcggacgcatgctacactaccacaaagaaatttatcggcagcacggcgtaaaattaatctcaggaaagcatttcagctttgtggctccgttacgggacaacatgtcgccatacttgatgatgtgattaccaccggtgcgaccatgaccgagatttcccgtttgttaattcgtgctggcgcccgttcagtgcaggtttgggcgatctgtcgaaccttgtagtcaatacgaaaatgggcgtattataaccaactatagcagtcaactattgagcaaatgatatgattaatattactgaagcagcgcaaactcattttgccaaattactggcaaaccaagaaccaggtacacaaattcgcgtatttgtcatcaatccaggtacacctactgctgagtgtggcgtatcttactgcccgcctgatgccgttgaagcaacagatactgaactgaaatttgatcaactgtcagcttacgtcgatgaactgagtgcccccttccttgaagaagctgaaattgattttgtcactgatcagttaggctctcagctaacattaaaagcccctaacgccaaaatgcgtaaagtttctgacgattccccacttgccgaacgtgtggaatacgttttgcagtcacaaattaatccacagttagccggtcacggtggccgcgtcagtctgatggaaatcactgatgatggttttgctatccttcaattcggcggcggttgtaatggctgttcaatggttgatgtcactctaaaagaagggattgaaaaagagttactgaacatgttcccggaactaaaaggggtaaaagacttaactgaacaccagcgcggtgaacactcttattactaaaaatgtattactaaaaatgtattactaataacgtattactgataacaaattttcccgctcggataatcgtcgggaaaacattattacaataataaccaacgggataagttctaagagcaattcaatatatatggaacattttcagactatcagccctgagcaggcttatcaacactggcagaataaatccgcgattatggtggatatccgtgatccacagagtttccggacaggtcatgcatgtggcgcttttcatttgactaatgacacgttgaatgaattgatgttacaagccaatttcgaacaacctgttatggtcatgtgttatcacggtcatagcagccagagtgccgctcagtatttattaaacatcggttttgaaactgtctacagcattaatggcggctttgaagcctggcgcagagactatcctcacgctgttgactccttacataatccggcataacacacctcatgatccgcgtaatcgctatttcaaacccgcgtctagcgcaagcctttatcgattatatggcaacccatcaggtccatctcactatgcgccccagtcacgatgggcaacacgtcgaactgtggctagaagatgacactaaacttactctagttcagcaagagttggagcaatttactcgcgatccgctaaatgaacgttatcaagcggccagttggcaatctggcgatgtgaatcacccattgaagtaccacaataatctgaattggcaatacttaagtcgtcaggctggcccattaacccttaccattttactcctaaatatcgtcgtttatctctggatgcaatttgccggcgattatcaggtgatgtcttggctggcctggcctaacgatagccaacatatggaactatggcgttgggtcacccacggcttattgcacttctcactactgcatatcatctttaatctcatgtggtggtggtatcttggcggacaaacagaaaagcacctcggtacaggaaaactgtttgtcattatgattgtttccgcggttttcagcggttggggacaatcattattcagtggttctcactttggcggcctttctggtgttgtttacgctttaattggttatgtctggctaaccggtgaacgtgcgcccgaacgtggtattggtgttccccgtggtttgatggctttttcgctcttctggctaattgttggatacttcgatgcatttgggctatcgattgccaacgccgcccatttctccggtttaattatcggcttactgatggcgttatgggataaccgtcatacattcaaaaataataaccgacatttttagaaacttaggggactatcgtgaagcaaactcaacggcatgatgcaatagttgagctggtacgccttcagggctacgtcagtactgaagagttggttgaacactttaatgtcagcccccagactatccgccgtgatttgaacgacctggcagataaaaacaaaatacagcggcatcacggcggtgccgcgttgccatcaagttcagttaatactgcttatcacgatcgcaaaatcatgtggtcagaagagaaagcacgtattgcacaacgtgttgctagccatatcccggatggcgcagcactgtttattgatattggcaccacacccgaagctgtcgctcacgcattgttaaatcataaaggtctgcgaattgtcactaacaacctcaacgtcgctactctgttgatgacaaaagaggacttccgtttaatcttggcgggaggggagattcgttcccgtgatggtgggattatcggtgaagccacactggattttatttctcagtttcggcttgattacggcattctcggcatcagtggcattgacatggatggctcattactggaatttgattaccatgaagtacgcattaaacgcgcaattatcgaaaactcccgttgcgttatgctagtcactgaccattctaaatttggccgcaatgctatggttaatctgggtaacatgaatctcattgatcacctctttactgaccaacttcccccgccaagcatccataaagtgattgagcaacataacgtgcagcttgaactctgctaagaattttctctatattcgggggatagcgctatcccctatctccttgccgttccacaattacactatcttttagcttcttcattaatgccatgcaaattatatggataaggtaatatttgctatccatatcacgtgagcatgttttttcttaacaaatagttggctattgatcgatttctgattacaatcatgagcgaaaacgagcattaaagaactgtttcgaacattttagggggatgcatggaaactaaagacttgattgtgatcggcggcgggatcaacggtgccggaattgcagcagatgctgctggccgggggctctctgttctattgctggaagcacaagacttagccaaagccacatcatcctccagttcaaaattgatccacggtggcttacgctatctagaacactatgaattccgtttggtcagtgaagcgctggcagaacgtgaagttttactgaatcttgcaccacacatcgcttttccgatgcgtttccgcctgccgcatcagccacatttacgtccagcatggatgatccgcattggcctgttcctctatgacaatttgggcaaacgagtcagcctgcctggcagtaaagggctaaaattcggtgccaattctgttctgaaaccagaattggtccgtggctttgaatattctgactgctgggttgatgatgctcgtttagttgtccttaacgctcaagaagtcaaaaaacgtggcggggaagtccgtacccgaacaaaagtgacccgtgcatggcgcgaacaagagggttggatggttgaagccgaagatctgcgtacaggtaagacctatacttggcgtgcaaaaggtctggttaatgctaccggcccttgggttaaagaattctttgacgatggtctgaaattgaaatcaccttatggtattcgcctgatcaaaggcagccatattgtggtgccaaaagtgcatgatgagccgcaagcttatattctgcaaaatgaagatcatcgtatcgtatttgttattccttggatggatgaattttccattatcggaaccaccgatgtggaatatcaaggtgatccaaaagaggcgaagattgacgatcaggagattaattatctgctgagagtttataacgaccacttcaagaaacaacttaaccgtgacgatatcgtctggacctattctggcgtacgtccactgtgtgatgatgaatccgactcacctcaggccattacgcgcgactatacccttgacatacatgatgaacagggcaaagcaccattactgtctgtgttcggcggtaaattaactacttaccgtaagctggcagaacacgcaaccgaaaagctcatgcaatactatcccacggccggaaaagcctggaccagaaatggtcagttaccggggggtaatttggaaggatgcgatcgtgatggttatgcccgtttattgcgtaaacgttacaactggttaccggaaggcgttgctgtacgttatgcgcgtacttacggcagcaacagcgaactcattctgcaaggtgctaataatctgaccgatctaggcgaatccttcggtcacggcctgtatgaaacagagcttcgttatctggtcgataatgaatgggtcgttgaactggatgacgcaatctggcgccgtaccaaattgggtatgtggctaaaagaagagcagaagcaacgcattgcagcatggttagcggagaatgctaaaccacgcactgagatttgatttttcttcacagaaaatcattgatcttccagtttagaaaacgtgactaccgcgagaatattaaaacctttctcgcggtttttattgcgtagaatttatatccgatttctccctccaatgttatatcaatctttccaattcctgattgacacataaattagccaaatattatatatattcagtgtaaaatactgcctcatgttccctgttggagcaattaaccacgaacattttaagattcttatataaacaatactagcaacttcatagcaatcattaccattcttcgcgtaacttaccttgatatttcaatccatccaactttttatccccccataaaccaaaaacgctattattctgttctggaatattagcatcaagataagtatctaccgctcttcggctctgtgtagcacgtgacttatcaggagaacatttctctacaatttcacgctttttaattgtttcttccagcagatttatattaatttctaccatagcaaccatatttatttccccttatcaggtatatgtatcatatacctcattagttcgactgtgtattttttgatccaaaaaattattgtgataactaatcaacagattttactctgaaaatatctattgatcatgtaaacaaaacatttaaaacatgtgacttttccatttgcaacaatacctaaaataatctataaataaagctgttacatacatatcgatactgtttaaccctatctttgattagataaaaattcaaataaaaacaaattgttaagttatttttagggaatgaacttaacaaacaacctggtagcaatagatgccccaaaattataacttgtgagatattacatgactattgatatagatattgatcaactattaaaagcagaagcttcatttatgctagggaccctgacattagaatccaacattatcgaggttatgaagtacgaaagtggcacccttttgataacccaagatagtccattctacccaaagaactataagtggccagaccaactacatgataatggaataatttcaataggcgataaagaacttgctgtgacaaaagtttacactgcgggccttattgatggtcttttatatatagatcaggaaataacgaaacaaacaacgtcgccagaaaaaattatgccagcacactacttacctgatttacacggaatttctgagagagatcttatagggaaaacagtaactctatctgtgaacgatgaaacaaggtataaggtaagtgctgcacactctatggcccactttatgtcccttgctgtaaataaagcaacacatcatatatggtccaaagtgtacgataccgatgatttgggaaactataatttagataaagctgccatttaccaatcttctattacagaacttaaatccgttgatatttatcgctttggtaaatcgatcaaaaagaaaggatttgataaaaatatactaattaaaaatctggataaaattaatagagaagttaataacacactcaataattggttatctcagggtgcggaaataaccattgaatataaatcaaaagagattaatgacactagattatggaaatcgactattgactctaaggtagtcactatcccatgcggaggcacacatataaataatattaatgaagtcaaagacgtaaatgttgaaataaaaatcggtgaatctgctgattttattcaagtaacgacttattgcagagtataaaactatgaacctcgacctactttatttctatcttctgctggttgttttatcctatatacccaatggatttcaagatgcatcgcgacggcaagggagcgaatccccgggagcatagataactatgtaaccggggtgagtaagtgcagccaacaaagaggcaacttgaaagataacgggtataaataaattaaatacttctctattgttctaccataagaaatatcaatccttctgtaatacatctttgacagtatatccttgattgggatgattcggtgtctgtggaaatgccatcattagattctgcttattaagcagtggttttatatggcgctgtctgagattctttgcagaacgattaagtagtatgcctaacacatcaatacggatatagtgagattgacaaagtttcataataatcgattgcatttgttctagatctaatcgacgattttcataagctggtttagcaatttctcgcaatttttctcttaaatcggatgttatgtactttaagtcatcaataaatggcaggctaaacgatgaaggagcaagacgccctaactcatctcggtggatttgaatacctgaatatgaatgaggcaagctagattccttatggggtaagtccaatttattattaatattatttattgttccagcagagaaaagttcttcagggcttggtaacgacatacccggcaatgtataagacttattacgcttctcacctgatgagactaaaaatcctttattctcaaggcgaggaaaggccaaagtgacttctcgggagtgtagcgttgttaactcacaggcccgctgatgattaggctgtgtcccgcaataggctgagatagaataatctatctggctctgactttcggaaaaaacatgttatggctcattacgaccttcctgatgaagcatgggagtgattgctccccttataaccggttaaaaagtcagggaataaaagtgataattctctataaatcaaatgaaaaagcgtggtcagatggacgggttaaattcgaccatgaaacgtatcgaagaagaaatgttgtagaaagatgtattggtcgactcaaagagcatcgtcgcatcgccacccgttatgaaaagacagcacgctatggtgaaattaggttgtatctgcttatttcttaaggccataatttagttgagggacataacctagaaatcggatttatgcctcagaaaaatcaacagagtgatccagcgcaagcaacagaccatctttctgaaaaattgaggctgtaatttaaatagttacttaacggcgtgtactattccgttgtttctgaactctattattgcttaaaattagtaaagaatttcaagttgaataggatcacttattattttaataatcccagtgtcagatttttcaaattcaatttgatatttttcattgtcaatgcctgtgataatattatctagataagaatatgcaaaccttattgatttgttcttagcccattcaggtaataagtgtacatagtagttaaaaactataaatcctctttttttatttatgtaatttatatttagaatgtcttttaacatcattctaccgtaacaaaaatcaccatttttattaaattctttttttcctaacttggttaagttccataatttattttttcctcttttaaaatccaatttcactaatccagcatcaacaagagattccatgttcgcattaacccatatagaattttcattaattgatactggccattcagtttcacctaggcataataatattttatcgtcaatttttttttgtattttttttctaaaagattcattttctcctgaatgacaaaaaaaagataaaaaaacaaaaaaaaataaaaaaaatttcataaactacactccatattatattctgtcatggcatcactaacatttttatattttttctttgtaagataggatttagtataatcccaataataatttgaaataccaggcacttcattgttatattttatatcatatttaataaattctactgggtattctccaaatatgtcatcatcattattttttttgcgaaaaaaaataatataataaactccattttttacccctagctcgtaatcttgtatttttatttcagaagcagataatttaaaatcaaaccaagtaaaaccagtatcatttgggagtggaactatattaaatttcccatttttattttttataaaaacagttaatgtgttacttggatgagatgtattgttttcaaatttggcataaaaaattacatctttttttccatcaccattcaaatctataagattgattccatcctttagatttaccttatttccgcaatgagaaaatgcctcaaacgagaaaagtaaaataaaaataaggtaaaatttatttttcatttaaatagctcctaactaatctaaatccaacatctggcataatatatcctgaactatggttatcacaactggataagctgtttgcatgggaaagataacttccaccacaaaaatagtacaacttaactgtaccaagttcataactatcatagacccattcagaaacatttccactcatatcgtataaatctaagtcgtttggagataatttacctacaacctgtgttccaaaattacttgtattaaactctggataccatgccaccttcttagaatcattgcttccagagtgatagtatccatatcttcctaatcgtaaggcaggttctccgccccttgctgcaacatgccattcatttaaggtaggtaaacgatagccattagcgtttgtatttataaagatctctaagtttttgtctttttttctaataattttatttcctttttgaaaatatactggagtgagttttaatttctcacttaatgcatttgaaaaaagaatggtatctaaccatttaatactagtcacaggatgcctgccttcatcctgctcaggaggaagacaatcttcataatgtgacccattacatccatcatcaaaatcataaccatttaatatagcccattcatatacctctttatattctgaataagtaacttcattcttcatgatataaaaagaatttaatgtaacattagaatgagattcataattttgagcgccaaacacactaccaacgtaaaaatcaccgccttcaacaaagctgagtttcatgttatcaaatgaatatgcttttgatgacattattatagataaaaacaaataaatatatttcatttttttcctatatttcaatgttgcttttcgggtatgagcagcaagtcagtatatatccagaagatattttatctctagatattccaccagaatgatctaaattaacttcaccagaaataagctttacttgacatttaccacaatatccagaagcgcaatgatattttaatttaactccattcttataagcacatttcaaaatcgtttcattcgatgatatatcaaaagaatcatttccaatttttaatttaaagacatccatttttatctcccgtattttttaatcttaaaataatctctttcattatctttctgttttctgtaacaaaggtatctgaagccactgcattttcatttatccttcttaataaatatggcaatgatttatcaattggcccatatggcaaatatttacacgtcctaataccattgtaagctaattttgatgaaatatgatctccaatcccgtacaattgtccaatccaaaatgatttattttttaattcattcttatttaatatgattgatatactattttcattatgagttgcaaaaaaaggataaaaatactcaattctttttgatatgtattcaactaaataattataatttaaatcagtctcttctttatttaaaaaaaatgttccaattgatttttctttatttttaatctcttcttctaaataagctcctctaacaatcttaataccaactttaatgttattatcaatagcaattttatgtagtaacatcagaagatcaatggattcttttttgtaggattgtattgttaatgttataataggtaatattttattgtgtttaataatgctatctatgacaatcttgtctactgctgcctgaatccaagattgctctgcatcaatcataactttaactgatttaatttctgcataatgaaatattttttcataacgttctaatatcctactccaagaattaattttttctccaaaaaaattccaacctctcattttttcttcataaagatgaatatctcctagtgatgaaggcttaatggcaacatatggtatattggactctttgctagcgagatcaattaattttaatgttgactctagcgcattatcaaagaaaatttcgtcgtttttcccttcaattgcataatctaatatgctatgaatattattttttgatagaaaaatcacattagcctttgcttcatctatactttcaccaccaaaataaaccccatttaaaaacctaataaaaaacttattttttttatttaaaataaatctcatcatccataaggaaattttttttgtgattttatttgttaacaataaagttacaaaaaacttaagaaaaagggttgatatactatatctagaatacagtgatgtttcgtctttaaaaaccttattattgtttgattttttattagccattatttgtaatttctatagttataacaactcatatgtcactttatttttacctccccttctatgaagggggaggaatttaaatatcagcagtttgcccacggtaaagacgacgaacgatattatcgtcatcaaattcttccctttcatgaataactcttctgttatccattataattaaatcacctctttcccaataatgcttataataatagcggggatttttcataaattcagtaagctcagcaaaaaatctctttgtttcttcatctgtgaacccaataattcttggctcccagctggctggttgtccctcatcgaatggaaaatatattagcatttttctcacccatccaaggtcagtaaatacaggaacttgaaaccatccagcaggagatacatctacatagtagccatattccagaacccttacttcaaaaatttcattttctaaaacatgtaataaatgcttaggcatttctttgcatgcaagaacatgatcacaaacagtagttgctcctcgaaacttcatgttttttatttctgcggcatataaaaaaacctgatctacttgcgataacaataacccaccatcagcatgaaatgggagttgtccacgtccagtgacaacttttcctttttcgccctcaagttttaatgtatcacgatacccaaaaccaacatctattttttcatctgcatattcaactattgttccatatttgctgtatatatcacgaaattcatcagcattaaggtttattttattgactacaacaaagccttgcctcattagaagatttttaatttcttcagcagaaactttcaaaaaatcatctgcactaatgttagcaccaaaacctgacttcattattggcgaccattgtaaatttttattcatttaattatccttattaatatttctcaccaagtacttttttaaaatgcttttgagaatctctagagccaaacgaatttttatgaactaattttgattcttttctgctatcttccaagatatcaacgaattttttgttcataaatttttttgtgtttaagtatgctgttttcggatatgttgctagtaaattagcgcgttctattgctgtttctaaaagaatttctttatctattacttgatttgcaatattgtattcaatacacatttctgatgaaatctcttcgcattcaaatacaatttttttcattatattatgtccatgtgtaaaactaagtatagctgcacctacagaacaaccaataccgtgttttaattcaggcattataaatttagcttcacttgatacaattctttggtcaaacattaaagaaaattgaaatcccattcctatagcataaccatctaccgcagctactgttggtttgtttacgtttaaaacagcacaatatagatcaatcactctatctatccaacgttccacactttctcctgatagatttttaacttcactgaaatctccccctgaagaaaaagaacgattctccccaccataaacaacaatggctttaacattgtcatcttgatcagctttaattaaagattttttaattgagttttctaaactttcactaaatggattatgcttattttcatggttaagaataattaccctaattgagctaaaatctctttctattaccatatctaattccttcttatgatttcacacaacttggttgaatttgcttcctcaattgacaatcttcctgtcaaaaattctttatatatagaataactaaaccttgttttatcttgatagttatttacttcagttcctatcattgttgcaaaagatttattaacagatgatccttcatgaatacctattttttttctccacactatttcttttgggaggatatttatactatttgcatactctcgtaaaatatttttaacttcgttatctcttattttaaagtatggatccaaattatgacataaagatataagattattagtccaaaatggatgataaacattcaacccataatttcctgctccatgagttgaaaattctcctgtccatttagttctataaacttgctcagacaatattttatttggttcaatataggatttttcggggtctaatatacctccaaataatagatcagaaccatatcctgttatcaatgaattaacttttccttttgctaattcataaacattaaataatcctgattgaatctcagaagataatccgtcaaatatttcattataataaatagcttttactacacctgatataacttcatcttcactaagaattttaacttcgtgctctgtaccaagataatcagaaacaattttagaaaattcaaattcattgcttaattctgttcctatagaccatgtttttactttatcaaaatactttgatgctaaagcagtaactaaactcgaatctaaccctcctgatagtggaacacctatagtttcattatttttagataaccgggaaatagagtttctcaaatcagaatcaattatttcaagaagaacactttcttttatatcaaaagaattttcctctacaggagatattacatattcaacttccaaatgaagatatctctgttcatcaaatgttaatttatttattgtaccaggctttaatctggacacatttcttattggtgaaaaattatctggttttagtgagttcttaataacttcgctttcaggtttgaaatcaaaagctttatctccctctaccttaccaacaatcttcaaactattagtaatccaaatcaaatctgtctgtactaaatttactaaatttaatcctctagactctgttattacttctatatttccctttttatcctcaataaaaaggcaataatctccttctgctatagaaataatggaattaccaaatttatctctacttaataataaaatttccacatcactaagcacactagatcttccttctatttttccaagaatggatctgatggtagatatgttatatatattaccaattaaaaaagcagtatatctttcacttttaaatttagatacctttgttgtactacggaagagtatggttccagtagataattcatcaaattgaaattcatttattaatttatttaaatttttatcaaaaccatatttaacaaagcaaaactctgagctcaattttaaattcctttttataactttataaaagtattttaaatagttatacttctaaaaattaatctggtgttaataatagtatcatattaaattaatttatcaatgcatttgatcattaaaattaaaattatttatatatctaattaactatttgtttttaaatatagaactcgcaatattattgtaccagtgacaatcacgcatggttacattccctctgatatattatgtatctttcatggatccaagtaggtacaagttcagctaaaatcatagttgtatgcattccaatcattttcatctgattaggaattttattctgtactgtgcattatgatagagaagctaaccccgtttaatgagtgcaaaatataccgtctaactgtgcagaattggttaccgtgctacagattcaaagaaaaaatgggtaaattgcaatcgtatttatcacgcgcggtatcatcaggtatgtgtccttagcaaaagaagccaactaatagttatataaattaaatataacaaaattgtctattaagaaattaacaaatccttgcgctcactaattattgtagattaattatggatttatcaaatataactaccgttcagtcaggtcgaccaattacatgtaatgtatggttgttctggttaaggtagttcaccgagagcatacccaacaacgtactaggctgtgtcccgcaataggctgagatagaataatctatctggctctgactttcggaaacaacatgttatggctcgttacgacctttttcttaaagccataatttaattgagggacataacctaatccatccttctacagccactgtcgctaaaatcattcgatcaaggttttctagttgttcaaatttaaccccaaacttaagtttcaaccgcattaagatattttcaggtatcaagctcactgtcagtaattctaacaaagtttgttctggtgtctaacgttcatataaattaggccgacgccagtcagcagaagactagccactatattttggataacccagcatgcttacgtttcataagatttcaaatggagacgctaaatgtatatctattagttatacaactgctataatgactgtctaccaatttgctacacaggtgatttatgagaacacaacctaaagaaaccccgatcaacatccgggcgaaagccttccagcgggagcttattgaccatgcagcaaacctgctctcaaagacccgaactgatttcatcttggacgctgcctgccgcgcagccgaagatgccatactcgatcagcgccactttttcgttaacgacgaaaaataccatatgttcatgcagatgctggagcaaccgctttctgataatgaaggttttaaaaaactgatgggatataaagcaccgtgggaataagcacacctgaaatattaacggctgaacataatataaatgatttttattgccagcatgaaacattaaacgaatggctttcacgccgggctttaaaaaataataagctcggcgcgagccgcacatttgttatttgcaaggaaggcacaaaagacgttatcggttattattgtctaagcgccggttcaattaatcatattgaatctacaccatcgcttaaacgcaatatgccagatcctatccctgtagtgcttcttggccgtctggctgtcgatgtggaatatcaggggaagaagctcggggcattgcttctccaagatgcttggaagcgtgtcgccagcacagcagaacaggtgggcatttcagctataatcgtccacgcacttgatgagagcgctcgaacgttctatacgcgtcttggcttcgtccagtcaccgttggagccatacacgctgatgcttccattaggcaaacagaagtgaaagaatttttactaaaccctttttttccctttggtattattgtcggaataatattttatcccaagacaagaaccactattccttaagtattcaccaaatccaccgcttcacgagtcaggcgaccgatttcctgccagttttggctgcccaccagcgcttgactaaccatccatgaaccaccacacgccacaatacgcggtacagcaagataatcgcgaatattatttggcccgattcccccagtcggcataatttgcaattcagtataaggtgccaatatcgctttaatcattggcaaaccgccggaaggttctgccgggaagaatttcaatagttttagccccaattccattgcaccttcaatcgcacttggattattcacacccggaataataggaatattcaattgctgacaggctttgaccgtatttggattaaaacccggcgaaaccataaaatcagcgccagcctgttttgcagcaaccacctgatcacggttcagaacagtacctgcaccaatcagcatattcggctgagctgctctcaacaaacgaatagcttccgccgctgccgtagaacggaaagtaatttcggctaccggcaagccgttgtcagccaatgctttacccaacggaataatatcttccgctcggtcaacagcaatcacgggtacaatttttaactggcgtaactgttcaatcatctgtttcatcaattttctctccgctgttaaaagaaactgtcagtcactgcttgagttgcactgattggaataatcgcccctttatgctgaataacggtaccagccagacaatgccccataattgccgcttgttgtatcggacaatccgtcagaaatcctgccagaaacccagcattaaaggcgtctcccgccgccgtggtatcggccacgttaacaaccggcaccgttgggatcagctcaatcggagtatcctgtaccaaatgctgataatagcaaccggcagcccccgctttaatcacggcttctttaactcctgcttgtttaagacgaatcatggtttctgtaaccgatttatcgccccacagcttacattcatcgtcatctgtcaccagtgccaatgaggtaaaggcgagtaatttctgataacaaacttgggtttcctccacactttgccataatgccgaacgataattactgtcgaaaatgatggtttttccttgagcagccagctcagccagcaagtttagtagcttttcacgatcatcaacaggcaagatagccaaactgataccactgagataaatggcatccatctgctgtaatgcttgcataaccgaagagaaatcaggatggcgcaccatataacgggcagcggaattattacgccagtacagaaaggtgcgctctccctgtccatcaagttgaatcaaatacagtcccggttggcgaaccggatcacgcaaaatcagatgggtgcgaataccctcgtcttgccaacgtgtgatcatcccttcactgagcgaatccaagcccaacgcagtcacaaaatgaacagcaatcttctgtcggcttgcacgtgctaaataaaccgcactgttcaagacatcaccaccgaaagtctgatgcatggtcgaaaaaggggcaccattaagttcgatcatacattcaccaaggagtgcaatctgcttcatagattttctcccggcaaagcaaaataacggcgggcgttattaaaacaaatatcctcaactatctgccctaacatggctttgtggttaggaatttcgcccttttctgcccattgccctaacacattacacagaatgcggcgaaaatattcatgccgcgtgtatgaaagaaagctacgagaatcggtcaacataccaacaaattgactcagcaacccaagttgggaaagttgttcaagctgacgcaacatgccatctttctgatcattgaaccaccagcccgaaccaaactgcactttaccggcgataccgccaccttgaaagttactggccatcgtagcaatcacttcgttatctcgtggattcagacagtaaagaatcgttttcggcaactcatccgtcacatccatactatccagcaagcgagatagcggccaagcaatattgttatcaccaatggaatcaaagccgctatccgcgccaagtaagcggaacatccggctattattgttgcgaatagcgccgatatgcatttgcatcacccaaccacgggcggcatattgccggccaagccataccagaatcgccgtggtgtactgtgcaatttcaagctcagagagaatgccccctgccagccgtttttgcaggatgccatttaataccgtttcatcaggaataggagcatagcgcaaattttctatgccgtgatcagcagcccggcagccatgagcagcaaaatgctcaagccgacgctccaacgcgttcaacacatcagcaaaagcaacaatcgatacatcagccacggcttcaagctgtttgatatagtcaatgaaacccgccaactcgattttaaatacccgatcaggacgccagcttggtaatacttcgatatcgaaactctcatctgtcgcgatttggcggtgatattgcaaagaatccaccggatcatccgtggttccaaccatacgtacattcatttgctgcatgatgccacgcgctgaaaacgccggggctgccagcttttcgttgcattgatgccaaatttcatccgcggtttgcggcccaaacaatatcccgctaataccaaatggacgacgtaattctagatgtgtccagtgataaagtggatttcctaaggtcaacggtactgtttctgcccatgcctgatatttttcataatcacgggtttgcttgccggtaatcagtgattcatcaatacccgcacagcgcatagcccgccatttgtagtgatccccttccaaccaaatctgaccaaggttatcaaaccggcgattttcagcaatttcacgcggattaagatgacagtgataatcataaatcggcatatctgcggcatgttcatgatatagctgacgggcagtttcattgttcagaagaaaatcgtcacacataaaatttttcatatcattttcctgtcagctaaatcgagtgccgccacagcatgacgagcgccgcaatccaataataattgataagctgcggtaaccgcccggacaaaatgcggattagctaacactgggttaccaaaaatcgccaacaacgcgggtactacatcaacagataacccatattgctggtaaatggatttaaactgctcaaccagcggatcacgcacatcaatcaatttgccttgttcatcttttccactgacataacgcatccacccggcgatacccaaggctaaatggcggtaatcgctgccgtttgccagatgataaatgacagaatcaaacatacgttgtggcagcttctggctgccatccattgctatctgcccggtttgatgcttaaggttggggttactaaaacgttcaatcaacagatgagcatattgaaaaagatcggttcctaccggcatcgtcaaagttggcgcttgttctttcaacatcagatccaaagcggcttgccggtaatcggggttcgccattgtgtcagcaatatgcgcatatcccgctaaatagcccaggtaggctaaaaatgagtggctaccgtttagcatccgtaatttcatggtttcaaaaggcatcacatctttaacgaattgggctcctgccacatcccagtttgggcggccattggcaaagttatcctcaatcacccactgacggaaaggttcacaggtgattgcactgggatcgtatacacctagctgtccggctatctccgccaccgattctggcgtagccgcaggaacaatacggtcaaccattgtgcatggaaaagtcacattcagttcaatccattgcgccagcttttcatcacgtaagcgggcaaaacccaccaccgcttcacgggcaatgttgccattctctctgatattatcgcaggacatcaccgtcaatggcggcaagtcacgttcataacgcagacgaagcgcctcgacgatataaccaatggccgatgttggttcggttgggttagctaagtcccgttgaattaatgcattattcacatccagcttgccgctggctgcatcgatgcaataccctttttcagtaatcgtcagagaaataaccgccacttgcggctgcgctatcgtttccagaataccttgctgacccacaaactcagggtgtaaagcatcaaccatagagccgataattttcaactcagtttgttctgtccccttctccgcaatggtgcacaagcaatcttgctgtttaagttgctgaatcaaccgatgaccggagaacaaactgacttcacaaattccccaatcactgcccgttttttccaacatatgatgagtaaaaaccgcctgatgggcacggtgaaaagcgccacatcccagatggacaacacgggcaaccaacttctgacgatcataagaaggcagagaaatagcggggttaattttactgttggctatattacggatcatagaacaattcctgtttaatgacgcggattacttaaatactgagtaattcagtaacatctgaggcaaccacaagctcagttgcggtatgaaggtcaccaacatcaacgcgataaccaaagcgcaatacatgggaactaacggtttcaataccttattaatgctgacctcaccgatagaacaacccacaaacagcgcactccctaccggcggtgtacaaataccaatagctaggttgaaggtcataatgatgccgaaatgtaccggatcaacgcccatattctgcgctactggcaggaaaatcggcgtaaaaatcagaatcgccggtgtcatatccataaaggttccgaccaacaacagaaccagattaatgaccagcagaataaccagagggttttcagaaaacgccatgagtgcatcagcgatcaaatagggcagatccgcattcgccattgcccaagacatgcccattgatgcaccaatcagcaacaaaacaatggaagtggtcaccgcagaatccagaatgattttgggtaatttagtgatactgacttcacgataaatcaatactgccaatataaagctgtacaacacagcaatcgccgaggcttctgtggcggtaaaaataccggcaatgatccctcccataataaccacaaccagcatcagagaaggcaatgcacgaactaatgtggtgaaaaattcgttccatgtcggcttgggtgataccggataaccacggcgcttggcaatgattgccgccacaatcatcaaagatgcccccatcaaaataccgggaatataacccgccaaaaacagtgcggcaattgatgtgccaccagaaaccagtgagtaaacaatcaaagtattacttggcgggatcaacaaaccggcaggacaggaagcaatgtttacagcagcggagtattccggctcataaccctcttttttctgcattggtgccatcgttccgccgaccgccgcagccgatgccactgctgagcccgaaatcgcaccgaaaaacatattcgctataatattgacgtgcaccagagaaccgggcaaacggccgcccatgactttcgccagattaattagacgggcagcgattcccccttgattcataatatttcccgccagaataaagaacgggatagcgagcaaagagaagttatcaacaccgactgccatacgttgagcaaccacggtaatcgccgcttccattggtaaagtcatcataattgccagtaatgatgacaaaccaatcgcaaaggataccggtacacccagtgccagcaacacggcaaaactaccgaacaacgctaaaaccacttgccaatccataagcccatcctcttctgcctagtgactttattgattttcagaaataaccgcgtctttacctgaaaaattccgaataagagcaacaatgtctactagcacatagcagatcatcagaacaccgctaattggcagacataaatagacatatcccatcggtaatcccagcgcgggcgtgatctgcccggtttcaagggttgagatcaccagtaccgatccgccatacaccagcacgatcgaagcaaacagcatgatcgcggcctggatcaccaaacccacactatttttgcctattcccttaagtttcatcgttaacaggtcgatagctaaatgacgatgttgacctgtggtatatgccgcgccaatcatggcgacccacataaacagataacgagcgagttcatccgttaccgtacttggcgtaccaaacacatagcgggaaaccacctgccatgtgacacaaaacaccaaaaaaacggaaaggctgacggtaaaaaatgccaaacctttattgaggcaatacacaaggtttttcacggggctttgtccttattggcctcaacatgtgcccgatttgatcgaccaaatagggcaaactgtctgaccaaaatcagtaaaggaagctttacgttgcttggattataagatccaggtcaaaaaaacatccagtgagcgggatcacaaactgactggtccacccgttggcccgattattttgtgatattggtcaaccaaatcacttttactttttgacgaaatccgaagtgatgcttatggtttgaccgtcagttcagttgtgcccgtaacctatttacaacaattggagaacgaacaatgagcaattctaagcgaattttatctactgtaatcggtgcgatatttgccttaagcgcgtcacaagttatggcagtaacaacattaaaactcagccataaccataaccgcgatcatgcagtgcacaaggcaatgactcagtttgcagatgaagttcgccaaaaaacgaatggtgatgttcgtattcggatctatccagacgcacaattgggtaaccagcgggaatcgatggaactgatgcaaaatggtgcattggatttagtcaaatccaatgccgcagaactggaagctttttcgcccacttattctgcttttaacttaccttatctgtttcgcgataaagcccattacgaaaaaattaaaaacggcgagattggtaaagagattctgacatccagcaaaaaccgtggctttattggtataacctactatgaagcgggcgcacgtagcttctacgccaaaaagcctatccgcacacctgaggacctaaaaggcatgaaaattcgggttcagccaagcccaacagccatctcaatggtgaaaaatttaggcggtaacccaactccactggcttacggtgaactgtatactgctctacaacagggtgtggtcgatgccgccgaaaataatattccctcttttagcctgagccgtcacagtgaagttgccagatacttctcgctggataaccatactatggtgccagatgtccttgttatttctactaaatcgctaaataaactgtcatcagaacagcaaaaaattcttataaccgcggccattaactcttctcaatatatgacgaaattatgggaaaaatcagaggagaaagagcgccagaatgcagagaaaattggcgttaagttcgtcgatgtggatcaaaaatcgtttgaagaggcggtcaaaccgatgtacgacgacattaagaaaagcgacccaatgctttaccgtatggtagagcgcatccgcgcagtcagataaatcattggcgaaggccaaatggccttcgcccttgagcggcatttttggttgaccaatttctatttttgactattatccatacaataccatcgataatcacgacaacaatagtgacaccatgaagcatttacttgagccaaaacgtccttaccaagaagttggcatttcattaagagagatgattgccaaccagcaatatcgtatcggggatcgcttaccaccggagcgagaacttgctgaattactacaggtttccagaaccgttgtgcgtgaagcattaattatgctcgaactagaaagccttattgaagtgcgcaaaggttccgggatctatattattaaccgccctcacctgccgacttcctcttcatgctcagttaacgcagcgggaccttttgagttattacaagctcgccaattgctggaaagtaatattgccgaatttgccgccatgcaagtgacaccaaataacattgcgaatatgcgtcgagccttgcaaaaggaatccgaagatttggcctccggtgaagatgaatccggtgacagagaattccatctggcgattgcggaagcaacccataacagcatgttagttgaactgcttaaacaatcttgggcatggcgggaaaataatcccatgtggcagaaactgcacactcgaattaccgataaagattatcgtaaagaatggctgcatgaccatcagatcattttatccgccatgatcaagaaagatccggcggcggccaaacaagcgatgtggcaacatctggagaatgtaaaattacgtttactggaattgtctgatattgacgatccctatttcgacggctatctctttaactcatatccctgtaaataagtttttattctggcgtttgtatataaggtaaataacaatggaacaaacctggcgttggttcggcccaaatgatcctgtttctttagatgatatccgtcaggctggcgcaaccggcatcgttaccgcattacaccatattcctaacggacatatttggaacaaagacgaaatcttggcccgtaaaaccctcatcgaaaataaggggcttatctggtcagttgttgaaagtgtgcctgtccatgaagagattaaaacccggaccggtcactattctcaatggattaataactacaaaacttcactgaaaaatttggcggaatgtggcattgataccgtctgctataattttatgcccgtgctggactggacacgcaccgatctggaatattcactccctgatggttctaaggccctgcgttttgaccaaattgccttcgccgcatttgaaatctatatcctcaaacgaccaaatgcagaagctgattacaccgttgaagagcaagctcaggcaaaagtctatcacgacaacatgtctgcggctgatattaagaaactcaccactaatattattgccggtctgccgggggccgaagagggctatacgttagcagaatttcaggcgcaattagatcgctacaaagatattacccgcgataaactgcgtgaacatttggcttatttcctgcaccagattgttcctgtatgtgaagaatatggtttacgtctggcaattcacccggatgatccgccgcgtcctattctgggcttaccgcgtattatttccaccattgaagatattgaatggctgaccaccattgaaccaagcccggctaacggtattacaatgtgtactggctcctatggtgttcgtagtgataatgatttggttgagataattaaacactatggcaaccgaatctatttcactcacctgcgctccacccaacgggaagaaaacagcaaaactttccatgaagccactcatctggcaggtgatgtggatatgtataatgtagtgatggaaatcctgcgtgaagaatatcgccgtaagaaggttggagataaccgtttgatacctatgcgccctgatcacggccatcaaataattgatgacctgaaaaaacagactaatcccggttattcctgtattggtcgattaaaaggtttggcagaaattcgcggtctggaattaggtttaaggcgagcgttttttgaaaataaataatgaatttacgttattcactatatttactagtaaccctaaaaagggttactttatttagatgaagccatgttaaagcgattgactacaactttatacccgcatctttcaagttgcctctttgttggctgcactcgctcaccccagtcacatagtttgctatgctcccggggattctctcccttgccgtcgcgaagcatcttgaaatccatagggtatatgtacaggctcattttaaactaaaattttaatttattattttagttgatttattaatatataaatttgggatgaaaacaaaaaattcttatcgatctttctatttttcaataaataagaataggttatgccaatttattttcagtctcacctgtcgtatagtccttaggtttattttgaccagatgtctgcgggttacgataggttctcaatccacctttcttccaatctggccattgttcaactattttactcgcttcacttaaataagctaaaaactcctctctcttagtcatttttttaactcctttattaagttatctacgttagctgctgattcggtttctttttctatataagataatgatagcatcttcattctcagccttccatcctttctacgccacttaataactttgccacccttattttttctttttattttatatcctatccccagatttgttgaaaacaaattaaagaaacagcgaggcccaacacccacaaatggttcaaaaatcactttattatcataagactcttcaggtgtttaaatagaatcaggatgaaaatcaaaagctttacttttaggataaggctcaatatagacaactcgccgtataccgctagcaacgatatgttttgcacagttatgacaaggaaatgtagtacagtataatatcccattatgagtactaatgttacttcttgcacacgccaagattgcttccatttcagcatgtacaaccctgccatattcggtaatatcctttatcttgctatttaggagacatcctctaaacttttctttttgttcctcttcaatatcttcaagtatatcttcaataattaatcttttctctttagcgtttgaatcttcacctactttataatctctaccattttcagcatcttcaattgaatctcctacataatcaggccaatataatcctccgccaaatcgtggcacatcattagctccagttgagattatattcttatctttggttaataccgcaccaacctgacgggaaagatctgctgatcgcagagaagcagaaaaagccatgaacatagcgtattcatcaaaggttggcgtgacatatgggttaccaaaaatcagatctaatattctccatatattattgtcggtcctatttttatttccatcataatttataaagaaatctgataactcataagtatctcgattacgctgcccccacttattcccttcattggaatcacgattaatcaattctctggcttttacttcatcaatacatttatcaacgataagatttcttaatctctgagattcactcgtatatacacctatcaagaaaaaaccatttacataaatatcccttagagcattgacttcatccgggtgtttgagagaatttataatatatgccctcctaatagatggtattgatgagaaatgcttcttctcccttcttttatttatttctgccaccgcagccaatgctaatatagaactatcctgactagactctcttaaataattaccctccgacattaaacaacttatcctttcataattatcccttgttgagggaatatctcttaataccgaaatgatttcagaagatattcttatctcctgtacatcatacctgaacgcattaagtttctttgttatagaatctctaattatttccagatccgttcctacagcaccaactaacgcaataacgacctcagaatcaaaatcacaaggcatcatctgatcaccctcaaatagatatgttttatttatatacccgttatctttcaagttgcctctttgttggctgcactctctcaccccggtcacatcgttatctatgctcccggggattcgctcacttgccgccgcgatgcatctcgaaatccattaggtatgttaatcatgttaagtatttctacctattatcgttttactctatttaaaatagccgttaattacatttgtaaaaaacggacaataacattcaaaaaaatataattccgtagctaaatatagactttttatttactataccctgtacattcttatttaaactcttcctctaataccagattaggaaatatgaattaacatcacataatttaccctttttcataaattcacctcccttctattataataaggactaaattgtatctctaattagaggaaaggtgtatccttgacgtatccaggacgatgagaatataaaccaaaaacaatccatgaagcaattaaaatatcaaaatcatgtcgaacaggcagaacattatcataatagttctgcctgaaaataaatagattagatagaaaatatctttatgatctcaatctaattttcttatccttccagaaaaaacggttcttaattcatatttacaaccctatcaattaaactaaacgggtatgaattctatcttccaacaacgtgcatcattgacataaagacgaggctccttcgtatcagggttaaattcaaaatcaataataaattcaatgctgggtaagaaataactattctcgtaaacccaccttaacgcctcttttttccctggcaagataaccgcatcaatataaagttcatcaccggatacttcaatacttagcattgattctgtttcgtgattataatagcgacctgataatcgctgaatatcaatatcacctttatcagtcatctttttcaaataaaaaacattgtcattttcatcaatctgttccagtgcgataacacggttattttcaatgatcggtctgaaccggatatctccccccttctcttggaatgttccatcggcgttaaagataatcggattacctttctcgaataaattacctaataaatagcaatcttccttggtaataatataaggatagggatcagcccccttgaacataccggtaatatcaatatcactggttcggcaatgctctggctcagccatgtcagtgttaaataatacattaagacattgattagtaaactcaacactattaatacctgttgcagcagtaatcacaacacctaatttagcatcaggtaaaacacaaacctcagctttaaaaccatcataggcaccatcgtgccgtattatcttttgaccttcacgttggctgatcatcaaaccgtaagcataattgttacgattgccattggctaaatttggcatacgagataaatgaggcaacatatcccgaacaatcgatggtgaataaaatgctttcatccaacggcataaatcactcactgtagaacgaagccccgcactacctatagttgaatcgttatgatccgatcttatccattgatttgaatctgcgttatagacataacctatcgcccggtcagagataacctcagtaacatcatcatagaaagaggtattattcatctttaatggaataaaaatattttctttcgcatattctcttaacgatttacccgaaaccactttgatgatttctgccaataaattatagcccatattggtatagctaaaatattccccaggcgtgaaattaagcttttgttgccgttgaatcagttttcttaataaatctatactgcggtggtcaaaatctgagtttttacccgccaaaccataaggggcatatttatcccgtaacccactggtatgatgaataagatgctcaatggtaatatcagagaaatgtgccgggaaataatccacatattttccaactttatccttgacattgatctttccttctttttccaacaaagcaatacaaaaagcggtgaattgttttgaaacactcgccatatagaacttcgtattgggggttatggcaactgcatgttcaatgctagcttgcccgatatagcgcttataaatagtttcatttccgtgggtaacagcaaccgcgagggcaccgccatttttcttattttcaatatcaattaaattgtctattttattaacaagagacttaatgttatctctagatatcgtcaattccatcatgaatttccttatttaaggttataagacagaacataaatataatagttctgtctggaacaaagtgtatctaatctggtttatcactttataaattaaactgcgacaaattctaccctccagcaacccccatcattaatatagagatgcggtttatttgtatcagaattcaattcaaaatcgataacaaattcagtgcccggggagaaatagctattaccgtaaacccgccgtaaaactcctttgttctcagggtaagtaaccccatcaatataaattccatctccagaagcggaaatagtcatcgttgcttctatttcatgactataataattccctgacaatcgctgaatatcaataccaccattatcagtcatctttttaaaataaaaaacattgccatcttcatcagtctgttccagtgagacaacattatcattttcaatgataggtttaaatcgggttttacttccttgctgttggaatgaaccgtcagggttaaaagtaatcgggtcgccttttccgaataaacttcccaataaataacaatcctccttggtaataatataaggataaggctctgcccctcggaaaataccggtaatatcaatatcactagttagacaatgtggtttttccggttcaactatattcgagttaaacaacacatcaagacactgttcaatccattgaatgacattaatatttgttgcagaggtaatagcgatacctaatttagcatcaggtaaaatacaaacatcagatttgaaaccagcataagaaccatcatgttgtattattttttgcccttctcgttggctgataatcaagccgtaagcataattattgtgattgccattagttaaatctggtgtacgagataattgaggcaacagctcctgaacaatcgatggtgaataaaatgctctgatccaacgacacaaatcattcactgtagaataaagccctgtgccacctaccacagaaccattgagatcatatcttgcccaccggttcggttccttgctataagtgtaacccatcgcccgatcaaaaataatctctgtgacatcatcatagaaagtagtatctttcatctttagcggagcgaaaatattttcttctgtatattccctcaatgatttacctgaaaccacactgactatttccgccagcaaataatagccagtgttgctataagcataatattcgctaggtgtaaaattaagtgttcgttgccgctgcgtcagttttcttatcaaatcaatatcatggtaatcaaaacgcgagtttttacctgccagacgataaagtaaagattcatcccgtaatccactggtatgatgaataagatgttcaatagtaatatcagagaattctaccgggaaataatccagatattgcccgactttatccttgacgctaagctttccttctttctctaataaggctatgcaaaaagcggtgaattgttttgaaacactcgctaaatagaatttagtattaggttttgcagtcacagcatgttcaatattagcctttccgatatggcgctgataaatcgttttattaccgtgggtcacagcaatagcaagagcgccaccctttttcttattttcaatatcaaccaattcatctattttcttgagaaacaatttaactttatctgtagatatagtagattccatcatgaacttccttattttaaggttataaaacagaacatatatatgacctaatagcaatatcatatacgagtaattactgtaaaacgtaaatagcaaatcatccaagtgataatcatcatcatttaatgtatggaaggcaatataaagtcactaccggagctaatgttgataaaaaacagacagaacataaatataatagttctgcctggagaaaaatgcatctaatagaaaatatatttaacccctcaatagcattaattccatccggctataacaatgccattattcattctgatttatcactttataaattaaactacaacgaattctatcttccaacaacgtgaattactgatatagagatgaggtttattagtttcagtatctaattcaaaatcgataatcagttcagtgctgggagaaaaataactattcccataaatccgccgtaagacttcctttttaccaatataaacaaccccatcaatataaatcccatcgccagaagcggaaaccgtgatcgttgcttctgtttcatgactataataacgccctgacaatcgctgaatatcgacactaccgtcatcaactctctttttaagataaaaaacattgccattttcatcaatctgttctaatgcaatgacactgccattttcaatgatgggtctgaaccggattttaccgcctttctcttggaatgtaccatcagcgttaaaaataatcgggttacctttttcaaataaattacctaataaataagtctcttccttggtaataatataaggataaggctccaccccccggaaaataccggtaatatcgatatcactggttaagcaatgcggttcttctggcttaatatcggtgtcaaataagatatcaatatactgctccacccatgtagaaacatcaacacctgttgcagcggtaatcgcgataccgaatttagcatccggtaaaatacaaacatgagatttaaaacccgtataagaaccaccatgttgtattatcttttgcccttcgcgttggctgataataaaaccgtaagcataattattacgattaccattggttaaattcagggtacgggataattgaggcaacagatcctgaacaatggatggtgaataaaatgctctgatccaacgacacaaatcatttaccgtagaatgaagccctgaaccaccgaccaccgtatcgttaagatcatctcttatccactgatgagagttcttgttataagtgtagcccattgcccgatcaggaataatctcggttatgtcatcatagaaaaaggtgtctttcatctttaatggggcaaaaacattttcttctgcatattcttttaatgatttaccagaaaccactctaactatttccgccagcaaattatagcccgtattgctatagagatgatattcccccggcgtaaagttaagcgcttgttgccgttgagtcagttttctgactaaatcaatatggcggtggtcaaagtccgaatttttacctgccaactcataaagtaaaaactcatcccgtaatccactggtatggtgaataagatgctcaatagtaatatcagaaaattccgtggggaaataatccaaatattgtccaactttatccttgacgcaaagctttcctgctttttccagcaaagcaatacaaaaagccgcgaattgttttgaaacactcgccaaatagaatttagtattaggctttacagcaacagcatgttcaatgctaacttttccgatatgacgctgataaatgattttattgccgtgggtaacagcaacagcgagagcgccccccttttttttattctcaatattaaccaattcatctattttcttgagaaataatttaatattatctgtggctatagtagattccatcatgaacttccttatttaaggttatcaaacaaaatatatatatacggcctgacagcaatacatatgcgggcagtactgtaagacgtaaacatgaaatatccaagtgataatgattatcatttaatgtgtgaatggcaatataaagtaactatgggagcggatgtttacaaaaaacagacagaacataaatataataattctgtctggaacaaagtacatctaataatagaaagtatttttaatccctcaatagcattaatgctatcctgctagtgaaactctattctaaatttatatttatacccgtcatctttcaagttgcctctttgttggctgcattcactcaccccggtcacatagttatctatgctcccggggattcgttctcttgccgtcgcgatccatcttgaaatccatagggtatattaactagccaattaaactgcaacaaattccacattcaagcaacgtgaattaccaatataaatacaatatttatttgtttcaggatcaaactcaaaatcaataacagattcagtactggatgagaaataactattgccataaatatgtcgcatagcctctttttttacaggatggataatcccatcaatataaatatcatcaccagatgatataatattaattattgcctctgtttcgtgactataatagcgccctgacaataaattaatatcgacactactttcattgttcatctttttcaaataaaaaacattaccattttcatcaatatgctccagtgcgataacactgtcattttcaataacgggtctgaactgaattttacttcctttctcctggaatgtaccgtcagagttaaaaataatcggattaccttttttaaataaatcacctaaaaaataaatatcttctttggtaataatataaggataaggctctatcccccggaaaataccggtgatatcaatatcactggttaggcaatatggtttttccggttcaatatgggtgttaaacaagatatccatataattatccgtccattgatcaacatcagcatcagttgcagaagtcatcgccatacctaatttagcatccggtaaaatacaaatattcgctcgaaagccagcaaaggtaccattatgttgtattatcctttgcccttcacgttgttcgataatcaaaccgtaagcataattattacgattgccattggttaaatctggtgtacgggataattgaggcagtagctcctgaacaatcgatggcgaataaaacgctctagcccaacgacataaatcattcacggtggagtgaaccgctgcactacccatcacagaattgttgatatcgcttcttatccactgttgcgcattctcattataagtgtaacccatcgcccgattagagataatctcggttatatcatcacagataacggtatctttcatctttaatggaacgaaaatattttcttctgcatagtctcttaacgacttacctgaaaccacattgataatttcccccaataaataatagcccgtattgctataaatataatattctccagcaggggcgttaaatgtctgttgtcgttgaaccagtttttccatcaaatcagcattgcagtagtcaaaacttgagtttttacctaccaaactataaagtaaaaatatatcccgtaatccgctggtgtgatgaataagatgctcaatagtaatatcagcgaaatgttcgggtaaataatccaaatattgtctgattttatccttaacgttgagctttccttctttctccagcaaagctatgcaaaaagccgtgaattgttttgaagtactcgccaaatagaatttagtattaggctgtatagcaacagcatgttcaatgctagcttgcccgatatgacgctgataaattatcttatcatcgtggataatagcgactgcgagagctccaccttttttttcattttcaatattaaccagctcatctattttattgataaacaactgaatattatctttagatatcatcgattccatcatgaatttccctatttaaggttacaaaacagaacatataccctatggatttcaagatgcatcgcggcggcaaaggagcgaatccccgggagcatagcaaactatgtgaccggggtgagtgagtgcagccaacaaagaagcaacttgaaagatgacgggtatatatatatacaacttgatagcagtacatatatgggcagtactgtaagacgtaaacaagaaatatccaagtaataatgactatcatttaatgtgtgaatgacaatataaagtaactgcggatgaaaattaaaattatctaaattttataaacattattttctttcagaaatcattttcgatctaatatttacaaaaacaggcagaacataaatataaccgttctgcctagaatgaagtgtatctaatagaaaagatctccatactctcacaatagcatcaatcctatcttgctagcaaaatactattctaaatttgtatttactaacctgtccattaaactgcaatgaattccaaattcaagcaacgagaattactgatatagagaagacatgtatttttatctggatcaaattcaaaatcaataataagattagttcctggagataagtaactatttccataaatatgccgcaaaacctctttttttacaggatagacaatcccataaatataaataccttcaccatacggtataatattaactatcgcctctgtttcattactataatagcgccctgacaataactgaatatcaataataccttcattgttcattttttttaaaaaaaacattgccattttcattaatctgttccagtgcgataacattgttattttcaatgataggtctgaaccgggttttaccttctttcgcttggaatgtaccgtcagagttaaaagtaatcggatttcctcttttttattctcaatatcaactaattcatctattttcttgagaaagaatttaatattatctgtggatattgttagtttcatcattaatctcctcatatttataaaaaacagacagaacataaatataatagttctgtctggaacaaggttcatctaatataaaatatctttaggccctcaataacattcattctatcctgctaacgaaacgctgatctaaatttccacgtactaacctgtgaattaaactgcaacaaattccacattcaagcaacgtgcattgccgatataaagacgagatttattggtatcaggatcaaattcaaaatcaataacaaactcagcactgggtgagaaataactattgccataaatatgtcgcaaagcctctttttttacaggatggataatcccatcgatataaagatcatcaccagatgatataatattaattatcgcctctgtttcgtgactataatagcgccctgacaataactgaatatcgacactatcttcattgttcatctttttcaaataaaaaacattaccattttcatcaatatgctccagtgcgataacactgtcattttcaatgacgggcctgaacttaattttacctccttgctcctggaatgtaccgtcagagttaaaaataattgggttaccttttgtaaataaattacctaaaaaataaacatcttctttggtaataatataaggataaggctctattcctcggaaaataccggtgatatcaacatcactggttaggcaatgtggtttttccggttcaagatgggtgttaaacaagatatccatatacttatccgtccatttaccaacatcaacatcgcttgcagccgtcatcgctatacctaatttagcatccggtagaatacaaatattcgctcgaaagccggcataggtaccactgtgttgtattatcctttgcccttcacgttggtcgataataaaaccgtaagcataattgttgcgattgccattggttaaattcggggtacgggataattgaggcagtagatcctgaacaattgatggcgaataaaacgccctagcccaacgacataaatcattcacggtggagtgaaccgctgcactaccgatcacagaattgttaatatcacttcttatccactgttgcgaattttgattataagtgtaacccatcgcccgattagagataatctcggttatatcatcacagataatggtatctttcatctctaatggagcgaaaatattttcttctgcatatttcttccacgacttacctgaaactatgctgacgatttcccctagcaaataatagcccgtgttgctataaatataatactccccaataggagcgttaaatgtctgttgtcgttggatcaattttctcactaaatcagcatgacagtagtcaaaacttgagtttttacctgccaaattataaagtaaaaatatatcccgtaacccactagtgtgatgaataagatgctcaatggtaatatcagagaaatgcgcgggtaaataatcaaaatattgtttgactttatctttgacgttaagctttccttctttctccagcaaggctatgcaaaaagccgtgaattgttttgaggcactcgccaaatagaatttagtattaggctgtatagcaacagcatgttcaatactagcttgtccgatatgacgctgataaattatcttatcatcgtggataatagcaactgcaagagctcccccttttttttcattttcaatattaaccagttcatctattttcttgataaataactgaatattatctttagatatcatcgattccatcattaatttcctaataatttaatgttatacaaatagagcacatatgcaatctggtaatacgatatatgcgggcagtactgtaagacggaaataaccaacatccaagtaataacgattatcatttaatatatataccctatggatttcaagatgcatcgcgacggcaagggagtgaatccccgggagcataggtaactatgtgaccggggtgagcgagtgcagccaacaaagaggcaacttgaaagataacggatataaagagaaacagaaagtaactgccgttactcatcggaataggtgaattagtgctagtgctgatttcgacattcataaaaaagcaattaccggacttattgtaagcccggtaatccagatttattcagtggcaagggaacctttctttgtacgaaagactaatacaagtcctgataaaatggcggccattcccaacaaacttagagcaggtaacgaatttcctaaaaataaataatccattacagcggttacaccaggaacgagataaaaaagactggttacattcactaaattacctgcctgaatgagtcggtaaagtaataattgagccacaacagagataactagccctaaccataataatgaaataataaagccaggcaccagttgaaattcaaaaggttggaaaggaacaaacaataaacaaagtagtagactaacactatattgcaggggtaaaaccgcagaaggagcttgatgaattcgtttctgtaaaatcgcaccaatactcatacaagccaatgctgctaaggcaaaagtaataccagcaatagaaaaccgagacagcaccaagctttgatacaccactaataccaagcccaataatgctaataacaaacccgctaaacgtacaaccgagaaacgacgttcgatcaccaacaatgtgataatcggttgaatccccatcactgtagccaaaacgccaggcgtgatcccgttatccaaagcaaaaaagtaacaaatagaatagccgccaattaacaaaacaccggtacccgcaatctgtttgcgagtaccatgttcaggtaaataatagcccttatgcctgaataataatcctagaaatatcaaaaaaataagtgcaatagcaaaacgcatcgtaagaatggcaaatgcggtactatgatcgagtccccaccgagaaaaaatcgcaccactgctccacaataaaacaaaaatcaaagtcgaactataagagatccattgagctttagaaatcatagagaatccacaccctgtcttacattttatgtacccaagtcaacgcagctagccaaatctgacaccgattaaatatcaaccctctctcagaggcaatcatattacacgattatggataaatatctgtaagcagttttcaatctccatgagcacgttgcgttaggtccaccaaataagatcaccattttgctgtaatcccataaaacaggtcaccagtaaacgccgttctggtgcagagatagtattgccattcagtaccgcatggaccaagttcccattcagtaataccaaatctcccgcctcaatattaatcaccatacttgcatgatcttccaataattccgacgggtatggaaaaccactgtaagttaaaccaagggcactacgcgattggtcgtcaggttgaatgttccatacttttaattgtccgccattttgaggaacgtcagcgtaaaaatttaccgccataacacgattaatctgttggatctcaaaatcactctggcgcggatcacttaactgcgcaagatcatcatgaggtaataaaaggaattcgccaaaattattccaatacacaatttttacattacccgccgcaacaccatgatacattgcaggacgcattacccgtaggttattactactaaaatgaactatttgatcaataaaacgatcaatgggattgatcgtatcttgaaacacctcattaattgctgaacggaaattttctgcttcttcaatatattggcgggtatctttttcaatatgagatgctccaatgaagtacccctcaacaccttcaataccttctccgtaacgaggagtccgtgccgaagaacgccaaaagttctcaattattttcctgctttgttctgacggaagaaaattacgaacccgacaagctgcaaggtggccatccaaaagggcagaaagtgcgtgtacagatatattgtttgatgtttcgtatatcataaactccgattctgccagtgttgctcctctaatctcgaatttttcttgcattatagtagattcacccattatttttgatttatacccgtcatctttcaagttgcctctttgttggctgcactcactcaccccggtcacatagttacctatgctcccggggattcgttcccttgccgtcgcgatgcatcttgaaatccatagggtatatagatctatgaagtaaagatctatgtctgtgtaaaaaacccagtattgcaggtaccggactaataactctcttctgtgcagaaagctgagtcgaatatttcctacgtaaatcaggtaatagactccaatgcgtgtttcctgagatatgatgttcttggtgatagccatcattaaacatcaaaaaattatagacacgaccatagtaactcactgaatttgcaaatttatttcccggcaatgcaccataatgctcataataattttgtatattaaccagaacaaaggcaaaatagagagaaggtagatagcaaaataagctccattcccaagaccaagtgaataagataatcacccacatcgcttgaaataatctatccagtctcaattgccacagctctttcattctcctaactttcactcttgaaagaagtttttcatatcctttatccgctttactaagcggtttatgccagataaatatagcccataacatacgcattaaactgttataaagagtaaatattccaccaatggtagaataattccaaagagtattatgttcccctctttcttttccattgataaaggttgaagaggtatcctgcggcccactttcgccgactccccggtcgttattatatttgtggtgattacgaacatgggacaaatgataagactgtatagattgcccaatattcattgaattcaatatagacacaaacatattcaaggcattagaaacaaaccaaggagtatgggtaaaaaaatgcgagatcactactatgttgtaagttgtcatcaatgtaaggagaataacatgagtcaaccaccccataatagtgaaaccattccaatacacaactagcgtaatagtggctaccgtatgcaagatacttaatgcaaacattactgcatcccaaggggaatatctccagatagccatcattatttattcctagtcaagataagactgtaaagttccgcgccgtcttacatccactgttgcacaatggaaggaaccgccgaacgtattaaaattcctgaaattacatggaattggcgtaaagccccagcgtttcatcgcagcaatcattggttcatcctgcttttcaacaatcacgcgctgttcatccaacatcagaatattcatgttgatccatttactggtggtatacagaggatggtcatcaggaataaccggtttcggcgcatgtaatacatcccagttcctaaatagttcaggaatttttaatactttttctgggtgaattaacagttttcctggcgccataggaacaaaggtggcatcaatgtgcatagggctatcatcgttaaattcaaaaacatgaatacgatattcatcacctatatgacgacgaagccattcaataccaaattcgtttgtaacatggctcttttgagcaataatgtctcgcccacaccgaataaaatccgcagcatcaaaagttggttcaaattcagttatagcaaggggaacacgctccttactattaggccgatgccattcgaaattatattgttcctcagtcaactgcggctttggcccagcgctccattttgcccctttcttaaagtaatctttaagtaaagtcttatatgccgctgtctcaaaataacgggaacgccatgctagcgggcattcaataatatcatttccaataactaacagcacatcgcgaggcatggcacaataaaaccctgtactactccagcctggtgcaccaaatacttgagattggtcttgcggctccggacgacgtactgtcacaccttcaccttcaagaatatggacaaactcttctaactctctagatgctgcatcaatttgctcttgcggaaatgaccgacctgcatatcgatgaaaattatcaacttgattcggtggtaatattggctctgtcgccatatgccaaccgggaaatctggcaccatcgactacaccgacaataacctcctcaagtggatcccattcattaaaagaacaaaccggggaagaattcttactattacaatctgttaaatttgaatcaagcatgtcgtctcctgatattttaatattatgtcgctttaaaactataacaactgtattaattgcgaccctattttcatcaatataaacctcttagaaaaaattcaatttcaatatgtcatcatacataatattatagatttacatttctttccgtttaaaaagtcaaattaactatgattttttataactaacaaatccaacaacaaatcataatattggctatttaaaacagtgaaaaactgttataaaatttattttttcatcataaaactttcaattaaggtaataatataaaaaacaactttatagtttcaccgtagttttataacgctaaaataagaatataaatttgtctgcgagcaataatatatggacatttgaatttgtaaagaaattaaatttaagcattgtaaaatagagttaatgtgattgtttgctatataattattgactttataaatattaacacagataaataaaagcttatttatagtaacattgtttttttaattctataataatgaacctcaatataaacacaggcagaacagtaatattaccattctgcctgtagttaagtgtatttaatagaaagtacatttaggatttgaataaaaccagtttcatcatacaaataaacattacatttaatttcaattagtaataatactgtatttgataactgattatattgcttaaatcaaatccagttattctaagaaatattttaattcacgcacccatttagaaatttaacaaatacttcttaaatttcaacacctactatatattttatcttagtaagtttactttttgcgacttttacttttacatctaatttttcatgaagaacacgtaaaagagaaagatagagcagcacaatcttatctttatctttatcatcaactagtaatagatgaaaatcatcaactacgcctaaaatattcagactaacaatgactgagctgggtgacagaatatcaatattgaccttctctactttacccactttaagatcatcatcgacaatcagctcttcatttaacaaaatatctttcttaattatcatgacataaactccaaaatttaatctaaccgattgataaataacttatatcattcaaaaatgaatacaataagccatttatcttgcccacacaaaacagtaaccattttcactagaaaacaaggtgtttatcaggaatttatccagtacttagataacatatacagcattttcaatgccatattgacgctttatctaatacatataactatagatgcgattaatgtattgtcaataaaataaaaaaataaatttaattaatttaaaatcaatattttattacccaataaaaatagaaaagatattacatcctgtaatgagcaggatatttttagtaattttttctagaaaatataatgacagcgataaatgataatgagaaataaacagatatttaccttctatgctacaaaaggtaaaaccgaagaaatcatctcagaagcaacaaataattcataacgttttagtactatattttctggaaataacaagcggtatattaatcaagtgatgatttatagtaaatattataattacatcccattcatctattataataacaagaatataaaataaatctcaagcaattatattattaaatttattacaaatcattaatcatcaacttgttatacccaatagatttcaagatgcatcgcgacggcaagggagcgaatccccgggagcatagctaacgatgtgactggggtgagtgagtgcagccaacaaagaggcaacttgaaagatgacggatatatttatatatatttttcattgccaaatgagatatcgaattaataacagttaatatgtaaaaataatactaaaaaaaacgtggtgtcaattttaactataccacgttttattactaaatttaatatcactttacaatatagaaaaaccaccgacgaattaatactactttagataacagacttttatccataatctctggacaaccagttctttatatcctcaacaataggagtaatttgcaaaacaccttcactatttctaaatccatgacttaggccagggtattgataaaaggtaatattctctttctttaattgctcttccattttcatcgctgcactagggttaactgaattatcatttagtgtttgaataatcagaataggtcttttagtctgacttaacactttatattgatcaataccaagtgagactctccaccaattagcaccatgattactcatttctatatgactcatattatccccggcagctattttttgctgaaaatccctaaatcctttaatctcttcattgagatattctggtggcgcttcactttttatactatgaataacatcatcagcgaaataccgacctccaccattcagtgacacagttctatcaatataattgacttgtgatgtaattaaattagcaaccactgccccttcacttccacccaaaataatgatcttgttatatttattctgatgtttcagataatcaatgatctgaatataatccttaactcgctgttctggcgtatccaacctaatataagctttaggacaatctgaacgctcaacaacatcagaccaagggagtgatgcattaatgccatacttttccacagtcagaacatcactatcgggataaatatcgctgaatgtattattcacaaacttattattagcgatactattacaatcagagccctgtatcagcaccaatagattcttaccacctctttgcttaagatagtaagttatttcactaccatcatgacggaaaaactgtttatgtgcatttgtatttgagtaagcaaaacctatataacatgaaaaaagcagagcaaatgtcaaaattctctgtcgtaaattaaaataatatgctttcattaatctctcctttaattgacatatacaaagaccacaaattgacgatattgttcctgtcagaaaaaattttaaaatttaaaaacaaggttcagagttttttatccaaagtgctaactaaaacacccatacctttggagagaagaaatgcaaaccactttatccacagaaattacattacccgataattatcatacccacgattttttcgctcttcatcaaagggataaacaaaatatcgctgaaattgtggaacagaataaagttcaaaaagggatgatgtgggatgacaaacctgcggaattaaccatagcgattaatgcaaaaaccgcacatatacaacttaagattgatggtgacacaacaggccctgatgagcgcttatctactttagcatcacatatgccagggcttctacagcctgttcatctatttgagtgtttatataaaaggcacccagttatcggttcacttattgccagacaatcaggtttaagaatttatcaatcggccacaccgtttgaagcattaagttgggcggttatcggccaacagatcagcgtcagtgcagccatctctattcgcaggagatttattcaggcaatgggcgttcagcactcttccgggctatggtgctttccaaccgccagacaaattatcaaccattcagaagatgaattacgccaatgcggattttccgtcagcaaagccaaggcattactccgcttaagtcaattaattgaatctggtgaattaacattagcaatctctaatagtgagacagatattcagcaattgatagataatctactcgctataaaaggcattggtatgtggacaattaactattccctgttacgaggatttaactatttaaatggctcattgcatggcgacgtcgcagtaagacgtaatatccaaagattattcaatcaaaatgaaaaagtttccgcagaacaagcagaaaaatggttggcagatttcgccccctggaaagccctattagccgcacatttatggcaacaagaatcaagtgcaggatattgatgttattgttaattttcatttccttagctggtatcgtgtattgttgctatatacccgctatccttcaagttgcctctttgttggctgcactcgctcaccccggtcacatcgttatctatgctcccggggattcactcccttgccgtcgcgatgcatcttgaaatccatagggtatagaacgattaaccttgaaaacaacttttttcgtgaatataaattctatgataagaccgacaaagtttccaataaatcaaattgttatgagtctattctcatttcttcttttttagatgatttattaaaagaaaaaatttctaatactcttaaatgtactactgaaaatcctatcgataaaaaaggaggtgttccccccttaatcagcgcacacttagcaaacaagttttaacttaaggtaaacaatactttgaaactctgccggaattttttctttaatatctgataatatttttttgtcggccccgatagcttctaaaagctcattaataatagattctagtttctccgttctatcccattggactttataagctgccgaatttatcttttgttctattctctgtaactgtttattttctttatatatatatttcattctaataatattcacctcgttatctacattttctttataggtgataatcatatgaatatcattagatttcttaatggtttcaatgctatcgtattcactctcaaaaatagcagttatgagctcatcaggctgaacacctttcactaagcaaaaggctaccattctttctataatctcgtttacttttaatgagtcgatcatcgtatcaccctcttaacttcttcaagtattcccgctaatgcccctattgattttagcaatgttttattatcccgatccttaaccgccccatatatcttggataatttgctattaataaaacgaacaacaataccatcattaacatctgttgtctttagattaggaatacagcgattaaaaacatgataaagctcagagcctttttcatcaataccattttcaatcaaaagattagcaacctcatcctgtattcgagtactcaagatttgtcgcatcatttttcttgcttgcgcaggccgcttctctatcaactcagggtctattaatttagcagcttcacgaatttctctctctacaagagaatctttcaaattttcaagcacatctaatggtagatctactcccgattgaataattttatttatattttcggatactaatgcatttatctccgctctctttctttcaaataattcattaaaatctatatcatcaagatatgaatctttattactaataaaagccccctcactatttacactagctaatgaattttctctctcaatatattctctatcactaaatgtatattcccggatacttcctcttttagctctatcaacttccttttgaaatacattccacattgtgttgagtccaatttcttcgtgaaatattaccaatccattattatcaatttcaaaagctgttatttcatcatcaggtattgcacgcaatattctaccaaccacttgtgcaaacgcattaatacttctatatggcctaaatatagccagaatacttaagtatttatgatcataaccctccatcaacatgttaactgaaattacgacatcacattgatgattttcaatatttctaaaagctctacgtaattcatctaaggacatttcactatgaacaataatagaatttaatcccttttctttataccaatgatataaatcttctgcgtgagaaatactacaacctacagctaatattttatggggaactttactagataatttctttaactcatttaattttaatatgctatattcaataacatcttttgagcattcctcagacagagcgacacttttctctatccattctttatctttaaatgccaatacctcttcctttgataatttaacttcctcattttcttttatagaaaaatacaactcatgtgcattaaccgtctcttttcttaaccacttcacataattatttttcataacctctgaaagaggagtttcatgtattttttctccaggaatttcttgattatcacctcgatatggtgttcctgtaacatgaagtatcttagcctcgcggaaatatcccaaaacttcacgccaactttgggcaggagcatggtgagcctcatcaataataataaaatcaaaaaaatcctgtggaactctacttattagacttgtctcacgcttacttgatactcgatgtatattagagtaaacaatatgactagcaaataaatgctcatcactgatatcttgaagatattcattcaccacaggaatatctttactattaaatataacatcacaattcacccagaaattgtcctctaacacctcttgagtttttcgtatactatctttagtaacaagcccaggagttatgatgagaactcttttatttgaaactccatatggcgcaatagaaattaaaccacttttccctgtacctgtcggtagtactactaatgcttctttattatctggctgattaaaatactctctaatcttgatgtatgcctcaatctgaggcgttcttaatttcttatttccctcaatattaactgctgtatcaaaaaaataagacatacatattccttttactctaccaattatataatcactattaaacccatattcatgcaaaatagtctatgtagtatggacaaaatcttgactaatagcacgaaatttataacttggtcgctcaataaattacttttcattttttcctaattgtttcatttacgctatctatttcaatgaaaacacaataatatttcacagtatataatcctatgaataatttaattatctaataataacccgaattctggataagaaattgacgggaatcctgttctaggaacaaagttttagtgaacgcctaaaacagctccggggaggagcaggtcatggataagtgagttgaaattttctgtaatgtcgatgatttttgcagctttttaataccccagtaggaaccgttttgtttcgataacggataccgtctgcgccatcggtaagattacatgtatcccaatgaaataatgaccatttttatcctctttaacatgtcacattactgtaattttaacgctttctatttggaacacctctggaaatatcatcgttttcggaacgatgcagggttcctctgaacctgctgctcattaacggaagaaaataaatagtaaattttgtcttctactgatgggtctcctttcatttttatgacaattttgggagcctctctgggaacacgataataagctataagccctttttcctgattttcataatcaaaatcgagaaccaagattttttcatcccctgaatccggataataatgatactcttcgaaataaaccacttgcccatccttaacaaagataatcttggaaaagatatcagtcctttcctttaactccgcaccaatgacagacttaatttcatcaagattccaaccactatcaataacatacaaagtgtcccatttaaacggcgtaattttgctgatgttaaccaagcagtctgtgttttgctggcaatgtttatcagcataatcaaacatactcttaacaatgctaaactgtcggttactattgaacataaaaaaaactatcagcaacgtgcatgaaaaaaaaatgattttattttttctgctgttccaattacatcgccaatagttactcaggtgaaaagccatcttcatttcctctttcaaataccgagttcatataagaaaactgctcatcggtgattttttctttgacaatctcaaaccccatcgcatttttcttggcaacatacagtccctctttatgaaagcgattcaacactgccttggcctgcgctttcattgacgagttcctgctctgtagggcaatcctacgccctatctggttattgagtaaatcaattgtctgatctgcgtccttaagggcagcaaactgccggatgttaagatctataatagggcaattctctttgttatatttatccttataagtattaactatatcagcaaagccaaagcattactccgcttaagccaattaattgagtctggtgaattaacattagcaatctctaatgatgagcaagatattcagcaattaacagataatctactcactataaaaggcattggtatgtgaacaattaattattccctgttacggggattcaactatttaaatggctcattgcatggcgacgttgcagtaagacgtaatatccaaagattattcaatcaaaatgaaaaagtttccgcagaacaagcagaaaaatggttggcagatttcgccccttggaaagccctattagccgcacatttatggcgataagaatcaagtgcagggtattgatgttgttgttagttttcatttccttagctggtatggcggaatgctaggttcactccgatccggaaagctgtctggtgaagttacgtaactacaccgaattgatggtacgcctgttgcatttaaatcatcaaattgatccatgcctgttcctcataaattctcttttttcttggtcgaaatttttgatcttggaacaggcattgagttacatcttttatccagagttcaggttatttatgtaaatcatatttcgcaataaatacactttctccggtaatagtcagcgggatcgattctaggccaataccctcacacggtccttctgtacaatgaccatcatgaaaattaaatctggcataatgaatcgaacacataaactgactgcggtccgaggtaaatatctcgccggagcgaacattcaaaggcacatcaaaatgtgggcaaacattcatatatgcccgtagttgacctgcatcattgtagataaacatgcgaaactgcgtttttctgtgtttcccaaagcaaaattccatcactccgccagatgtaatatcaaaaacagaacacaggtatgttcctggcagaggcgcatttttttcctgataccagactttcattttactcctcccgtggagcaccaatccccaacagccaagggcgaacgataatttctccataccctcgccagcatgtaagggtcatcctttaaaaatgcatacacccggtgtgccgggcagatgcgggcacgcagcgtctcccgagcaggtctgtcagtagccaaaacgacaaaatacacggttccttttcctttcagacgcgctcaatcaggatagctatcccttgtcccacgccaatgcacatggtgcaaatggcatatcgcttttgcctcaacgacagttccagcaaggcggtggtaaccagtcgggcaccactcatgcccagcggatgtcccagagctattgcgcctccattaggattcactcgctcatcgtcatccctcacccccaaagcacgcagtgtcgccagcgcctgcgaggcgaaagcttcattgagttccagcaggtctacttcatcaaggctaatccccgttttcaacagaagtttttgcgtggccggagccggaccaaagcccataatgcgtggttccactcccgccgtcgctgctgcaataactttgccgcgcggtgtcaatccatgccgttgcacagcctcagcagaggccaggatcagcgcacaggctccgtcattcacccccgaagcattcccagccgtcactgagcctcctgcacgaaagggagcacgcagttttgccagtccttccagcgttgtctcaggccgcaagtgctcatcctgatcgaccaccagaaactctccccgcttctgtggcacgctgactgaaacgatctccaaactgaaacgccctgataactgggcagccttagctttttgctggctgcgaaaagcaaatagatcctgatcctgacgggagataccaaacgtttcagcaacgttttctgccgtttccggcatggaatccacaccatacagctcggccatttgcggattgataaagcgccagccaatcgtcgtatcgtgcagtccgttagcttcccggctgaatggggtttcagcttttcccatcacaaaaggagcacgggacattgattcaacgccacctgcaatgatgagatcagcttcaccggctttaatcgcccgggcaccgatgctgatggcatccatgccagagccgcacaagcggttgaccgtggtcgccgcaaccgtcaccggcaggccggccaacagtgccgacatacgtgcaacattacggttatcttctcctgcctgattggcacagccataaatcacttcatccaccgccgaccagtccagatcttggtatttttgcagaaaatatttcagcggcactgcccccaagtcatctgcacgaatcttggacaatacgccgccatagcgcccgatcggcgtacgaatcgcatcacaaataaagacttctctcatcatcatggttcctaaatgaagatttctttctgacagaaataagtgccgcagtaattggctttattctgggcgaatcccccagaacgctttttctaataattccctgactgccatacagtcaaccggacgcggattataataaggatcagttgtggcaatcttcgctgctttatccagatctttttcctgcatcccgatatctttcagtgccacgggcgcaccaattgcttttgccagatcatacaatccagcggctgcatcctgcgcttttacccccagcgcacgccctatagcctgcattgcctgcggggcatacgtctggttgaacccggttgcctgaggaataatcacggtatggacttgcgcatgcggcagattgaaacttcctcccagcgtatggcagagcttgtggtgaatagccatccctacagaacccagtacgctgccggacagccatgctccatacaatgcctgcgcacgtgcattgatatcttctgggcgtatcacaacttcaggcaggcttaagcgcaatgccctgatcccttcttccgccatcatggatgtgatcggattgtgattctgtgaatacaatccttccacacagtgggcaatcgcattcatgccgctgggaccggagataaaagctggcaggctgagggtcaattgaggatcataaatcacggtctttggcaatacattcacatcgcgcccggtggttttaatcccgtcccgggttataccccagaccggcgtcatttctgagccagcataagtcgtagggatcgtcagaatcggtagtgcggtttgcagggctatcgcctttgccaatccgactgtcgagccgccaccaattgccacgcaaccgtcaacgcgcaactcgtccacaacgcgcatgacatccgctactgtttctgctgggacatgcatgacggctttatcataaataccagcagcaatatcgcctaatatcgactgcacatcagttgccagattaagctgctgtggcgttgagatcaccagagcccgagtgatccccagcaattgcgcctccgcttttgtttcagcgattttaccggcaccgaagataactctgccgggcaaagcttggtaaataaaattcatcatgatgccacttctgtatgcgcacgctctgtacgctcattgagatcccgtaatactttcagttcctgttctgtgggcggttgcgtcgtgtttaatactgaggctatccgcaacgaccaaccagtattctccagaacctgctctgtcgtgacaccggggtgaaggtaagtcataaccagctctttggtcaccggatcgggctccagaatccccaaatcggtaatgacagcccgaggccctccattggtcaggtcaagcttttcacgcgaatctccgccttgcaggtaacctggtgaggtgatgaaatccatgtgttcaacaaaagaacggctgttttgcttcagaatgatcaatacttccttgcagttagtgctgatttccggtgcaccgcccgcgccgggcaaacggactgtcggcgagtgataatcgccaatcaccgtggtgttgatattggcgtatttatcaatctgagcggctccgagaaaaccaacatcgatgtgttcaccctgtagccagtaacgaaacatctcaggcaccgaaaccaccacatcagccgtttctgccagttccccatcaccgatggacagaggcagaacgtcaggtttcgtgccgatggtgccggattcatagatcaggacaatatcgggcgtgcgggtcaggcgagccagattggccgctgcgctgggcataccgatccccacaaaacacacctgaccctctttgagcatccgggaagcacaaaccgtcatcatttcagaagatgtataggtattgctcacgctacctctcctttttgctctttctccaagctcagtttgaaggcagcgaaatctgccgtccctagtacgtgtttctccatccagtcgctgaacgtttggcggtcacgggcaatgctgtcccagttctggtagaacgcattgttacgcttatagtaaccctgcgcatatgaaggaaacgccccgccggggatcacgcagatcgcgtcaatcacccatccgggaagtactacctggttcatcgcgggcttgaggacgtcaaccacttcttccaccgtcacgatgactttttgggccgccagtacggcctctttctgtaccccaatgatgccccataacagaacattgccctttctatcagcctgttgggcatgaattatcgtgacatcaggacggatcgcgggtactgctgccagcctctgccccgtaaacggacaatttatctgtttaatcgtcgtcgtgtatttgggaatatcagagccgagatagccacgcaggacggcaaacggcagatttgccgctcccgcatcataggcattggccatatctgcatgggcatgctcttcgatctctagcgtatgaggccagcccttttccaccgcatcgcgcaagcggtgcagcgatcccactccggggtttccgccccaggagaaaattatctttctggcacaccccatgccaataagctggtcgtaaatcacatccggcgtcatgcggatcaatgtcagatcttttttgcgttgccggataatctcatgtcccgcagcaaaggggatcaggtgagtaaatccttccagcgcaaggatattaccgtcctgtaccagttcgcagacagcctgtttcagtgctattatttttgtcatagcgttccccctgatgcgaatttatctctggtaaaaaggcgggatttttgcatcaacattgacccacacagatttcacctgagtatattcacgcatcacttcaaaccccatctcacgaccatagcctgaacgccccacgccaccaaacggactggccgggttgacgcgcttgtagcaattgatccacaccatgccagcatgcatatcacgggcaaacctgtgagcacggctgatgtctttggtccatagccctgaacccagcccatattcggtgctgttggcaatcgccagcgcttcttcatcattcttgaaggtaataaccgtcacaaaggggccgaacacctcctcctgtgcaatgcgatcggaatatttcgccctgacgacggttggttcaatgtaacagccattggcaagagcgggatccgctggcggcttaccgcccagcaggatctcacacccttgtgaacgggcaacgtcgcagtaagccaacacgcgctccctgtgttgcaaagaggtcaccggccccatttccgtctccggtaacaaaggatcgcccagacggatggaaccggccagcgttaggaacttctccagaaaagcatcagcaatactttcatgtaggataatgcgcgatccggcaatacacgcctgcccctgattatgaaagatggcccaagcactgccgccaacggctttggtcagatcggcatcttcaaaaatgatattggcccctttgccgcccaactccaactgtactttcttcaggttacccgctgaggcggcaacaatgctctgcccggtcattgtcgatccggtaaaagcaattttgcccacatcttcatgctccgacaatctcgctccggcactattcccatatcccaccaccacgttaatcacgccaggaggaaagcccacttccatcatcagttcagcaatacgcagcgtactcagaggcgtgatttccgaaggcttgatcacaatcgtgttaccggcagcaagagctggtgccatcttccaactggtaaacatcaaagggaagttccaggggacgatttgacccaccacgccaatgggctcacgtgtggtatagttcagaaaaccttcttctaccggaattacgctgccttcaagtttatctgccattccaccaaaatagcggaaacagtatgccgtgcggggaacatctatattcagcgtatcgcggatcggatgtcctgtatccatagtttccagttgagcgagttctgctgcatgttcttcaattttatcagccagttttagcaacaaagcccctctttcagatgcctgcaacctaccccaagcggggtaggcggcttttgcagcagccactgcacaatccacatcggcctcttttgcttcagcaacccgggtaataagtgagccatcatgaggattcatgacttcaatagtctgaccgtcggacgcatctatccagtcaccgtttatcagcattttgttctgtatacgcatgggtatatcctcaccctgattagaatgtcaccggaaccatcggaatggtaccatccttgatcatgtccatgatttcaggcgaaccattttcccacaccagtaacatggagcgcttgggcgacattccctgatggcgaatatctcctggcatggcagcaatatccccggcacgcatggtgactttcgccagtgggctgctgctcttgccatccttgatatcccaggcaatttcatcagacaactggatgaaccattcggcacggtcattaccgtggtcaataggaagaataaactcttcggtagtcgggcaaaacagactctgacgcaccacggaaaccactgacggattccaggtcatatccgaacgggagagataaccaaacaggttgaacgcatgcagttcaccttcaaagcctggttcagctttcacgacgggctgctcctgatttacatccatgaaagcccggttaaccggatgaccattatcatctgaacgcagcggcgcatcacccggaatgcccaccatgcgtttagccacttcacgtttacgcccgattaaacgatcttcattgccatttttgcgtccccacgccactcccgtttcctgcggtgcagcgaagggatcaaacccggtgttggtccagtcagaaatcatggctttgaaaatcgccatcagctcgtcagatttgaaattctctttataatcacggccagcacgggtccattctttatggaatgaccccatgtacaaatcgacgttaccgtaatgattagtcgtgcccagtacatcatcaaacgcaacagtgccataaaaaaatccccaggcaatatcacgcatcaaagctttgaggtagtcatcgatcggtatcatatgttcccctgtcgggcaactgatgtaggcgaagtactcgcagcgatcaaacgtaaaatggccagcggtaaaagtttgatagcccgtttcggtattatctattgtacattttaaattcgtattcattttttcagccctcagttatgctgggaaaaaccatcaaattcaattaattcaggcagatatcagcccatttctggactgagacatcaccgagaattgactgaatcatcagagttgcaggcttatcagcatggaagcgataagccactttttcaggcaggagggcctggtgcccacgtttgaggtagatacatcccattttttgcccatcgggagtgccattcagcttaacagcgccatctttatcttcatcaatgaccgattcatcagtcagcttgacaaaatgcacctcaacatcataatccatagcaaccacaaattcgtcgtgcgcacaggcaaaccagggcgatgtcccttcggcacgagcgatctcgatggtatagtctaaattgatcgcagcaacgatacggtcgtagggtgcactggttgccgcgatttcatacatgttggaaaaaacgtaacgtttgggatcttcaaccagcgcttggatcccacctttgtgataattatcgattgatgcgaatgctgttttatattgcactaacatgatgttttatctccttaacgaaagtatggattgagaccttgaaatggattttatttttatatcatcaagtcactccgtgttcgcatagagaacaaaaaaatcaccatgcgaacaccaattagatattggaaacgtgttaataaaatgtcaatacctgaagagtcaaaagagttcgttacgtcactggcacgtggtctttctgtgatccaggtctttaatcgagcagcaaataagctgtctttaagtgaggtggccaagctttccgggctgagcagggcaactgcccgacgctttttatttacactcagcgtgttggggtatacagagagtgacgggaaacttttttggctgtcgccaaaagtgctgcaactggggtattcctatttagcatcacagccaatcgtgaacattgttcaaccgtttattgaacaggtcagtaacgaaaccggggaatcctgctcggtttcagtcttagatggttctgaaatcgtctatgtagccagatatatgacacatcatattatgtcagtcaatctgggaattggtacacgcctgcctgctgttgccacctctatgggacgcgttttattagcctataaaacacctgaggagcagcaagcctttctggcaaactatatactggaacgctacactccccatacgttggtagaacgtaatgcattactggggattctgacacaggtgcaggcccaaggatatgcgatagtcaatcaggagcttgaactgggcttaagatccatcgcggttcccattatgaatcaacgtgatcaggttattgcagccattaatgtatccacacagccaacacgcacatccgaatccgtattgctggaaaaaattctgcccagcctgcgtcaggccgccaaatgtatctatgaccgtctgcctgtgtgaccataccttcgccagagatgcagcactgacatcagtgctgctgaatatgcaagatccagcgcaagcaacggatcgcccagttcatcaatttttcggcgagggtattcagggacctgtttgtcttttttcaatgcagagcgagtcatcatgacgagatcaccttgtcaggaacaacattgtttatacccgtcatctttcaagttgcttctttagttgcttctttgttggctgcactcactcaccccggtcacatcgttatctatgctcccggggattcgctcccttgccgccgcgatccatcttgaaatccattgggtatatattttactttcgcgatcaagggaagtatttaaaggttctctcaaaatgaaaaagtttccgcagaacaagcagaaaaatggttggcgataagttcagcagcagtcatacccgtacaagcaaaatgtaatttgttttgaattgtcttaaagaaacgtgttgtttctttattagatggttcatagtctgctgccatcgtgaaaatctttttcaaccgctcgatcacaggagtcgtatttgattattaacttgttgatttaattctgtcatttcgtattggataaatgagtaacccccataagcacccccaaatgattttgcttgtagggttcgggggcatcctgagctactttttaggctctgttttccactgtagcaaaccggcgatatccttctcaccttcggcttcttttaagcgccggtgttgttcagcaaactgactatattccgcctgcgctttttcatcggccattttcttactgactttacctgcgccttgcagaacctcgcggtcgttaaattgcaggaactgatccagcttatcctgccagtcgcgtaaaaagacctgctgacgacgacgggcctgatcctcggcaaaatccagccacatgttaaccacacgattgagttcgctgacctcatcctgattaaggtagttttttgccaccgtcacatcacatttgcgcacctctttgcctttataactggtcaagcccatgtgcggctggctggcgtcagcacgcagatgaatgagttcagcggcggtatgtccggtacaggcaaaatgcaacttgttctggatggtttgaaaaaactgcgtggtttctttcaacgacggttgatagtcagccgctaatgcaaagatctcccgcacccgcaaatacacccggcgctcgctggcccgaatatcgcggatgcgttcgagcatctcatcgaaatagtccggtacagcagaagaaccaacaggcggatttttcagccgctcatcgtccatcacaaaacctttgatcaggtattcctgaagcgtctgggtggcccactggcggaactgtgtgccgcgaggggaacgaacgcgatagccaacagcaaggatgacaggcaggctgtagtgaagccgattgcgacttacctggcgactaccttcctgttgaacttgtaagtaagacttacaggttgcgttttgttcaagctcgccttcttcatagatcgctttaatgtgctgggtaacggcctggggggtgatctgataaaggtttgcgatggttgcctgagggagccatagtgtttcttgctcaaagcggcattcaacacgtacatcaccgtcatcgctggcaaacataacaaattcgcctgccggggattgggttaagtatttatctgtcatgccgcctccgcttacatctgactcataatgctgtaatccgcttagtatgccagatatccctggtgaagctcattacgcagatagcgtttattttgctggtagcgccccaggataatgcttcgccacgatatcattcatcttctctaccagatcagggcgtttaaacgtgatatgtccgctgcctttctgaaaataacgaatgataaagagatcatcctcgaagacctgctgatgtggattatcgcggacaaaatccataaaccggatagaaacatcatgccgattatcgggaatggttttaccatccagcaggtgaagcatccgttccagatcggctaactgatcacgccgccagccccagttcaggctgtagccccatcggtcatgcttcaccagattgttgatgatgatcttcttgccgaaacagcagggattattggttttgtagtcccagcttaatcccctgaacacattgatgatgccacgttcaaagacctcctgtttgttgtgatgaagctgctcaaacgtactcaggatattcgcttcgctgattgccggaagatcgccttcttcgaggttcttagcccactgactacacgcctcagcgtccattaacgtcaacatcccggacttcagcatgagatcgcgccagatactgcggtcgatattgcgggtaatcaccggcattgctttatctactggttgcatcagccagcagtcaaaggaatggccctgtcgcatcgcccaatgctccgccacatcaccaccgatgctggaggttagccgtgagatatcatcaagcttatggatcagaatttctatcaggctcagcgcagcatcacgtcctgtgacgatacgttcaatactggtcgagcaaattagctcattatggtcagttaagacttcagcttctgtttgcatgtttttgtccgtataaaagcaaacgcgcctgccgggagtggcaggcgcattatgtagtgagtaaataaggaagaaagatcgggaatgtaattcgggaagacggctcgcaagattcagcgagttgaaggatgatggctttgccgcaaaaggccggttgcttgccttgcccgtaaaatatctacagcccgaagataaggtgattgctcctgacagttaaacctcctgaggtcgatacgaaccagttcgtacttttctaccaaaaagttaacggcatcagccaatgtaataccagcgttgatatgttcctgaataacagtttcatcgctgaacggcgtgtcattcagggtgaggccataatgttgctccagcagacgtgtaagtagagtttgccagacaagcacaggtggcggtcatggcttcgccacccgctgatttgcaggaaaagttgtcatagggattctgttgggaaattgagttaacgttgagtgggatagatagcgatgtaaacgtagccacagctaccgagcgtatccgcttcacaggtcagttcgttgtggtacagcgttacacggtgtgcatcgcgggagttaagctcaccagagagcagcatcagctccatctgtttaataaagtgtggaaatgcggcattcagttggtggcactcttcctcattgaaagtgccagttatcccggcgcggtcagctaaataatgtagtcgattgccttcctgtactaaccttgcggtaaagcgaggcattaaatcgtaccgaagcccccattcagggttatcgtttttttccatagtaggttcctattcagagcagataagtacgcggagtcggtgttacagccagcccatctcagcaaaagacagcgtattgccatcaccgataatgaaatgacccagtacccgtacttccaccagattcagggtatttacgatccggtcagtgatagtgcgatctgctttgctggcatccgtaatccctgacggatggttatgtgcgagaatcaccgctgccgcgttatggcgcagtgctgatttcacaatttcacggggatgtgcttcggtatggctaatcgtgccgagaaatagagtttcatgttccagcaggcgatgttgattatcgaggtagagtacgacaaagacttctctctcctgccgtgccagatgcagttgtagccaggttttcgtataactggcagcaagaaactgctctcccggttggcgctggtatttttccagcaatcgcagtgcccgtcgaataatacgttgatcatttaccgaaaaagctggagttaaaattagtccagacatagtgactcctgaaaagtaaaagccccgccgcagtttagcgcagggcatgggatgtttgataatgcaaccagatgaacccgacagttaaggaaggtgaaagaaacaatctcccatttcactctgatattaaagacctgttattttttagaaattgaatcgtcattaataaaaggatcttcaggctttggaaaggttcttagcttaacgctgataatctgattgtcagcaaaggtaatataatgattgctgaaaatgtcttcagacactttttgcatgtctaccatctttttaatttgcacaggttcattgagtacaccaacaaagtagcctcctgatccacgtgtttttgcttcattgatatggagcatttgtaaatattttctgtaacgaccattttttctaaatacttcggcaaatcgcatatatttaatattcatcagatcgagatgataatattgttctccgccgccctgcggatataaaggcgttaatagaaaacagtagtttacatccacatcagcagtttcttttccgttcattttctggaatgtgatatttgcttcggtaataattaccagatttatccacggcgggatctctggcatatacatcggaagtttcccctgcaaatcatctattataaatctctttaaattacccttgttaatccttctgggcataatggcttcaataaaaggtatctggcatctgaaacctgtgttaactttttttggtaaagatgtacctaaaagtattgcctgtgtagagtcattctggttttttgagtgctctgttttctttatgattctattaactaagaattcatttgtgtagatgctattatatatatttccatgttcctgaaattgtttttccagttctcccagttcatattcccctagggcaaccgcatgaatgattaaatatcactcacattagcaaaacccgcctgtaatactcgctccaaaaattgggttttcatccatattcgtctacgcttcgctttgatgcttaattgactcgtttcttttttcagcatgtttaacgaaatacgtcgtaatatcgcgatgttttccgccgcattttcacggtaaatttgacaatcatcttccttaaacgtcacatcaagcacccagtgaagattattctctatttgccaatggctgcgtactgcctgagaaaattgttcttctgtcagtctggctgaactgatgtagtaacggtactccagactgggcaatttgccgttttcttgcctgtatccgattgtgacacccagggtttttaatcccgcccattccggaaaatcggctttgaatgtctcggcattcagcacatggctttctctgatttccagacgaccatgaccctgttctatccgcgctttttcgggtgttaagggcaaaacgcgctgggcttccagggctttttgaatggcacgatggagacgtttttggttgtctttcacacttaataaataatccgcgccggcatcaataatctcctgagcgatctgcgtttggcatcccatcgcatcaatggaaatcagcgcgcctttcagttccaacaacttaatgagttccgggattgcggtaatttcattagattttttctgggttttaacctggccgatgaccattttattggctgtcgcataagcactcacaaggtggagagccgaaccgcgttctcccggggcataggcaccccgtaaaactttaccatcaatcgccactaattccccctgagtgacctgatgaaccgaacgcatccagttgataaaacaaagattaaattgttccggattaatccgtgagagaagtcgggcaatcgtgtcatcaacagggatcccctccttgaacatattatgttcaagaaaccattcatggtggccttcaatatactcttggatctcactccaaccatcggcgccgcccagaacagcgcacaatgaggcaaataaaatatcgaataaagggtaggcaactttggcgctttgacggggatcttgaatgtctgagaaatgttcagtaaaaatatcaaagcacagggtttttgctctcaaaaagagagtatgagatcataactattaccgtcggtcaaatctgatttttttaacaaaatattcacgatcttgccctgcgatagatgccgactgataaagatgaccgaacctcctctgggtgctttactatgaccagaattggcagtccgtcaggcggtagccggagaggcctgaacgccccttgtgtgctaggagcggacattccacacttctgctaatgtggccaaaatcggcatgccactacaatctagcaaaggatagataatggataaaaatgagccaacattatggcctccataccaagtcttctatatccaatctatgttgttcaatacaacatcggctctacaggccgtggatagagcatctaagtacatccaagctatcagtgaagggaaactagggccacaagatcggaaagatgagcttctagactgtctacaaaacttcatcaatcatagtgctgctatagctcggtacttctttccatcaatgattggtggaaaaggtgagaaggttttatataagaaccgtgctgagtttcttaggcagatttttgatgtgacagaaagcagccctttgcatgataagaaacttagaaatgcaatagagcactttgatgaacgactggatatgtatcttgaaggtggaattgtaggaaatatcttcccaagtctaatcttgaacaagccagaagaaacagatgtgccgcatcacatcttcagagcctactatctaaatgatggaatttatcaagtattgggggaaagacataatgttcaacctattcttgatgaagtcatgagacttcatgaactgttggagatgtttgatgaaaatggtggaatgtttgggaaataaaaaagcacctccgggtgcttttttattttagatgtttggatgcttaacgaatggttaagcctgaaaattcatccttcttctttgaaataacattttttatccattctggattccatcgggcatagtctttaagtgcccatccaatcgcttttctaataaaggactcattctctgatgatagtaaatcagagtaatggtaaaggcgatctattgacctgcttcccgtagattaacacacaccaataccagtaatgtccaccttgacggtgattacaattgccaacatccgctacgtgccaacagcggatctcttcgccaggggtaaatccttactacaaatcgcaactacttgtgttaaaaagaagtttcaggctagttatgtgtgaagctttaataggagtggaaatgcgaactcagaaacgatgtatgggatatgtagccatagtagttgatgactatgaccgcgcaattgagtattacattgaaaaactgggttttacccttgttgaggatattccacagccggggaaacgatgggtagtcgtttccccgacccagaaagcgattgcaatcttcttctggcgcgagcctccaacgagaggcaagaagatttcatcggcaaccaatgcggcggtagggtatttctttttctccagactgatgatttctggcgcgactacaatgccatgaaatcaaaaggcgtagagttttctgaggaacctcgtgatgaggtatacggtacagttgtcgtatttgaggacctttacggcaatcgctgggatctttatcagaacaagtaaggctaaaaactatcttccggctactttgtcagtatgtagccggtaactgctgttacgtctgctctagtcgctcagagcagacggtcagattcgattacattctgcgtgcggaagctgtcagtacgagtccgagttaattcagattagaggcgcagttttctatccttcattccgcacctaattcaggaataaaccgctttatattgtgcacctaataaactcaaaagctcatggtggtaagattgcattcctgtcaccattttatgttcttgaaattcaaaggtgctgatcccttcaaaggccagaaatacccaacgcgcggtgggggattgtgtcggtttgttcttcatatcggggaaaaacggcacattttgtttcaattcatggcgaattttatgttccagcgccgcataaaccatgagacaacatgtcatcaccattaacagcgcttctatccgctccggttttttcaggaaaatggcagacgtcaggaattccggacttttcaggaagcgaaaaccccgctccaccttttgttgtgccttataattagccagtaacgccgccatatcaagccgtccttcatcccgttcattggtcgctaaaataaacctcccgacccgcaatctggcctgcttcaccttgtctaaccgggtataagcctgaccggctaattgataatgaaccgatttggggggttgatgcttgccgggtttcccgcgccccgcatacgcggtaatcgcctgaatttccggcgaggcgatgccgataaactggcattgagactcaaaatcatgcagtgcctgtaaggcatcctcccggcaggcaaagggctttttgcccagtttgtcgaactgtttagactcgttttctgtttccctgagtgtgtttttccggaaagtctggttttcacgtttttctgccgccgtactgttcaccagtaaccaacgctgaggaacgccgccatacgatgacgtcacccagcagcctgaatagccctcactgatggggctgaattgctccgctgtcacgttcaggagagactgtttagcttccttgatcgtcaggggaacacgcgtaataaatcgttgtttttgctgatgaagcgaagcgatcgcggcttcagtataaagggcggcatcggccacaaagtagcggctgttttgtgccgctttcagacattgaatatgggttttgatcgtctgggcaaaggctttggcatcattcgtattcccgctcatggcctgcatgtagacagggatacctgcctgattttcgcaaatcagttcaaggacaaccgggttcagttcgggccggtgatcccggctataacccggcaccagtgcaatgcgttttgtgtcatctcccaacgcgctgtcatagtcaccatcgacatgaaaactcgtgatatccaaatgaacggaatcgggatttaaccctaatttatcaaccacttgctcagcaagcacctgataaacttccgacacccccgcttcatataaggcatccagtgttcggccgagcacatcatcattaaggtgttcagcttcaatgtctgcgccaattaaacgcgcaatcggcttatgttgaaaaaagccggaaaacatgtgcaatgtccggctgtgaaaccccagcccgttaaggatcatcgccagaaaagcgtcgccgtgagagacggtatgcgatgaatattttgggataatggcatcaatcatgcggggtaaaccggcttcatgacaaaaagcggcgataaggccaagatgatcgagacgtttaatggcaggtatgggtgtggacatattcgctttccggcaaataaaagtaatagatcaaaattggcgattaccgtcaaccccaccgatgtcatcaatacaaaaaacctgtgtaagatcacattatttttaaatcagaaatacggtgcggaatgacggttctatgatttgttagaacccgcctccttaagaggcggcattcctagcgagcagttctatttactgtttattaaattcaataatgggacgtcagttacatcattaggaatataggggtcatcttcttctaaattaaccccaatacaatcaacatcatttaatccaatttcccaagcccaccgaacgtctaacgtactcatttctatacctaaactatctttttgtggatgttcaggattaatattttttaacatcgcatcacatcctagatagaattttccacaggcatgatacgcagcaataaatctttccaaattgacattgctatcgggagtcatcgtattaattctactgatcattgtcattcttttagtccgtggggttgtcttcatattttcagatatgagtactctataatgagttgggtttttaactgaaatacccttgacaatacaaacccgtaatctggctttagtatctaacaagcctactgatgatataagatctttaaaaatatcttcacccacactggagtctttaaataaaagatataatcctgggtgacatgttttgacttgaacgaagcccacccctttccagcgtgttctatcccacagacgaggtttgattagactttgtatggaataatctttatgtgttatattttcagcattaagttcctcttcaggcatttttccttttccaaatattggatcatttatatcctcgatctccaacactttaggaaattcactatcccaggatttatctcttagaagggggtaagttttcttttcagcactagtggaataaattttcttaattttttgatcaatatcatttccaagaacattttcaatagctttgatacaggcaccgaaactaattgctctgtcgaatgctgcatcttcgaagatcattttttcaatgtattctgtattttttataaaaaataattcagggagaagatcaaatactattttcttgaattcattggtgattttttgttgagcttcgattctaaaatcacttgtatcaaaaccagcgcaatttattgtaaggtttagttttccactattgctatttatttcatgtgataaggataagtcatcttcgtcatctgctattacttcaatatttaaaaatgcttctttcagatggatgttatcaatcgtacaagttgcaaaagcactctctaaaagtgataagacattagttgaaaactctataaatggtgaccgattcggaaagttaatttctatggcgcatccaaaaataaaagatgtatgtactccacgtttgtcatggttatcttttatacctttactattaaatcctgcatcaaagtcacgtattttttgcaaaaaatcattattatcattatcggcagtaacttcgtactcacgctcaaactcttcaatataacctaaagcatatttaagacatcccgatgatacaaaaagatccaatctatcaagttcatcagggatattgatctgtcgatttatttgttttagatcagtgttcaaaatgagctggcttatgtaaaaatcaacttgttgattttctttatcaccgagcgagctatcactgatattctggttaactattaaaaacaattcataccataaaagggcatgtgctaattttcctagttttatttctgttaggcataaaccataataaatctcaacctgctttaatgatatctcatcatacttccagtagtcatctgtaatcaacgaagcggatagaagcaagcatgaacgtgaactccatagcaacccaatggattcgtaagcataggctatagcttttaatgctaatataaatttatctcgtgattcttctttatagagtggaataaaagattttcctaaatacttgattgcctgataagggtgaccattttgaatcctctttatgcctcttcgtaaatttaataatgcccctttaacttcaccgcctctaagagcggattgctcagtcatatagtctaataaattttcatatgcatcaacctcgaaaaagatgtcatccagttcgttcaaaagttggaagtttttctcaaagggatagcctattaaatttccactatttttaaaaatttcatgtaactcttcaaatacaaccgaagcatcttctacatctgaaaacgttgtcattttataaatggctttgtgagttctcgctgtgagtgcattactgggacgtgattcatcgtcagctatctcatctagtttagcgagcatattacgttcaatattctcaatgtcgattgtagatgttgcgttgttaagtctaatataacttttatggactgttactaagtttaaaactttctcccattttgaggagttagttgatgatgctatacattcatacgctaattgaagattttcttcgaaaaggttaaaatcttccatccaaaaatgggacttccaagcgtattgataataagcatccaacaattgttggtttgtcccaaatttttttgagatttttatcgctctttcaaatagaccttgtgtttcaattatcgctttttcaagctcagcgcttaactctgcaacttctaagaaaatatccacttgctcatatgaaatttcagcagggtttactttatctctgatatactctattagttcttcatatttcttattcttcttatagtcattttccccaaaaataatttctcttttatattgcgttggaactgatagtgtatcaatcgccaatttctcaaaatggtttttgtatatttgatctagcaaccaattaatatctaatatacgaacatctatcccagttttgttttttagtgtatcctcaacctctgaacgaacattggactttgcagattgattcgtcacacaaaatattttagtatatccgcgccctgtttcttttatcttaagtacatcttcatggcattttttcttccagtccttacgcgtactcaccgcaaaggcccagcgctctttatttgatgtatcattaactccttcgaaccaaagaagcttactttgttccgaaactggaaaggtttgtgtgtcagttttaccatcgccaccagctacagggcctgtctgctcaaggagattagggcaaattattttctcacatattctttttgcaaaatcttcgaattgcaattcttgatttcttgtatttagagtagaaagaaaatgttcaagtacaactctatctaaagaccctgtctctcggatcgttgaatcagaaaatttttctggacgacgacgctttagaaattctttagatgaaaatttggcttcctgtactttcatgattgttatgctccatgtgtcaccgacatcaaacctttgtgtttatccgctggagtttttattcatactactttttttgaataaaacaccagtgatgtattatcttcaggcaagctaactatgtaatcactataccactgcatcatctccctacgcccctccaaatactgggcatggttgtaagtcccacgtatcgcgttcttatccacatgcgctagctgcgtttctatccacgcggagttaaagccttcttcatgaagaatggtactcatcgtgtggcggaaaccatgccccgtcagccttcctttataccccaacaactcaatcacctgattaacgctttcctttgagatcggcttcgttcgatcattgcgtccgacgaataccagcgggtatagcccagtaataggcttaagtgactcaaagagctcgacaacctgatccgacatcggaacgatgtgtggtcgtttcatcttcatcacttcagcagggatctcccagagccgcttttcaaaattgatatcctcccagcgggcaaaacgtaattcctgagttcgtacccctgtaagcatgatgatttgtgttgcagtcttggtaataacgcttccagtataaccggccagatctttaagaaagtgagggagttcttcagcagtcaggaaaggaaaatgcgttttctttggtgttgcgagggctgtagcgagatcgggtgcaggattgtattcagcgcgtccggtcacgattgcatgacggaatacttcaccgcagcgccgtctgactttgcgcatcttttctaatgcaccacgcttttccatacgacgaagggtttccagcaattccatgggcttaatttcagctatgggacgcttaccgatgtaggggaaaatatccttttcaaaggtatcaataatttcatcacgataacgtaatgaccaacgatccgctctcagctgatgccattcacgggcaatagcttcgaaggtattatcatagttgagtttttgagcaattttctctgctttctttagctctccgagatcgcttccagcagatagtaactttttcgcagcttcacgcttttcacgggcttgagcgagagaaacctcaggataaacgccgaaagcaaggcacttttctttacccgcataacgatactttaaacgccagtagcgtgagccgttggtggttacttcaaggtagaggcctccaccatcagatagtttgtacggcttctctttgggcttggctgtgtcgatttgtctgactgttagcttcattgggggcatctcaaaatggggctataaatcatgccccccattatgcccccaaaatgcacttgattctggtagagacagttgacctcgggagaacataatcagcagtaattgcgggtattataggggatttacttgagacagtggagttcaggagaggctaattggcggaagatcacaggagtcgaacctgccagagaccgctggcggccccatctggatttgaagtccagccgccccaccggggacgatgatcttccatatgaatactaagaattatgaaaagcaactcatcatagcgcatattatctggcttctgaatccgttagctgaaatcattctcaatttcctaaaaagcattaaattttattgttcataagctcaatattcgcgttgagtttgtcgaattttacctacatcttattagccgatacccattacgatacagcgttgctccgctcagcaatgtatccaacacataaaaggacgctttatatgactaacccgttactcgttccatcaggtttaccaaaattttcttctattaaaccagaacatgttgttccggctgtaaaggaagtcattgccaattatcgccaaaccgtcgaaaaaatattggccgagaataccgtttttacctgggataatctgtgtcaaccactggccgaagcaggtgataaacagtcccgtgcatggtcacctgtcaatcatctgaattcggttaaaaacagcccagaattacgcgccgtctatgaagaaagtttgccattactgtccgaattcagtacctggttaggtcagcacaagggattatatcaagcgtataagtcattacgtgaaagtgctgagtttgagaagctctctgtgcctcaacgcaaagttgtcgaaaatgcactgcgtgattttaaactatccggtattggtctgcccgaagagaagcagaaacgttatggcgagattagcgcacgtttgtcagatttaagttcgcaattcaacaataatgtgctcgatgccactatgggctggaccaaattaattactaatgtgaaagatctgtctggtctgcctgaaagcgcgattgccgccgctaaagctcaagcagaagctaaaggtcaaaaaggctggctactgactttagaagcaccaagctaccagccagttatcacttatgcagataaccgtgaactgcgtcgggaaatttaccacgcctacaatacccgcgcatccgatcaaggcccaaatgcaggtaaatgggataacagcgaagtaatcgccgaaatccttgcgctgcgtcacgaacaggctcaattgcttggtttcaaaaattatgctgaacaatcccttgcaaccaagatggcaaaaacccctaaggaagtgttggattttctgaatgatttgacaaaacgcgcacatccacagggcgaagaagaagtagatgagttaaaaggttttgctaaatggcatcattgtgcccacaagctagaagcttgggatatggcttactatggcgaaaaacaaaaacagtacgagttctctatcaatgatgagcagttacgtccttatttccctgaacaaaaggctgttgaaggattattcgaagttgttcgccgtatctatggtattactgccaaagagcgccatgatgtagaaacctggcatacggatgtccgtttctttgatctgtacgatgacaccaatgagctgcgcggtagcttctatatggatctgtacgcacgcgagaataaacgtggtggcgcttggatggatgagtgtatcagcaaaatgcgtcgttccaacggcgaactgcaaaaacctgtcgcttatctgaattgcaatttcaacaaacctgttggtaataaacccgcgctattcacccacaatgaagtcaatacgctgttccacgagtttggtcactgtctacacctgatgctgactcagattgaaactgccggtgtctccggtaccaatggtgtaccgtgggatgcggtcgaaatgccaagccaattcatggaaaactggtgctgggagccagaagcactggcattcatctctggtcactacgagactaaagaacctctaccacaagccctgctggataatctgttagcagccaaaaactatcaggctgctatgcggatcttgcgtcaacttgagtttggtcagttcgatttccgtctgcatgttaactacgatccaaagaaaggcgctcaaaccatgaagaccttaaaggaagtgaagaaattggtctcggtagtgccttcacctgaatggggccgtttcccacactcattcacccacatcttctctggcggttatgctgctggctactacagttatctgtgggctgatgtgttggcagccgatgcttactctcgcttcgaggaagaaggcatttttaaccgcgaaaccggacaatctttccttgataacattttgtcccgtggtggttccgaagagccaatggagctgttcaaacgcttccgtggccgtgaaccaaaactggatgcaatgctgcgcaaggccggtattaaagggtaatttaaggtgggaatctgtttaatctgtgaacaaggcgctgataacagcgccttatctcaactcgcggagcgctgggggttggtgcatgacgaaaacgctattatggcgttggtccttactcctcagcaccttgaacttcgcaaacgggatgaaccaaagctaggtggcatctatgtcgattttgtatcaggtacaatggcacatcgccgccgctttggcggcggacgcggcgaagcagtcgctaaggccatagggatcaaaaaagattatctgccaacaatcgtggatgctaccgcaggtctagggcgagatgcctttgtactggcatcattgggttgtcatgtaagaatgctggaacgccatccggtggtcgcagcattgctggatgatgggctgcaacgcggttatcaggatgaagaaattggtggctggttgcaacaacgcatgacactgctccatgcctccagcattacagcgttggccgatattacgccacaacccgatgtcgtttatcttgatcctatgtatccacataagcagaaaagtgcactggtgaaaaaagagatgcgagtgttccaatctctggttggcgctgatgaagatgctgatagtttgctatcccctgcacgcgttttggcaaaacgccgcgtcgtggtaaagcggcctgattatgcagaacccttagctggagtcgctgcatcagcagctatcaccacgaaaaaccaccgttttgacatttatccttgttaaaaaaatcagccgtatattgcggctgatatcttttaacctacagaataccttgagcaagcatagcgtcggcaactttcacaaatccagcgatattcgccccctgaacataattgatctgtttgccctcgccaccatactcaacacaagcgtggtgaatatctagcatgatatgatgcaaacgtgcatccactttttcagccttccagcctaaacgggccgcattttgtgccatttccagaccagatgttgccacgccacccgcattggctgctttacctggtgcaaatagcacacctgcttcaataaaggcttccgtcgctgaaatagttgctggcatattcgccccttcagcaacagctttaacaccattcttgataaggaccttagccgcatccaaatccagctcattctgggtggcacatggcaaagcgatatcaaccggtacagaccacggttgtaaccctttcaagaaagtcagaccccgctctctggcatattcttccactcggccatagcgttggttttttatctcttcaagatgagtcagtttctctggtgtgaacccatcctcatcaactaaggtaccgccggaatccgaagcggtgaccactttcgctcccaatgccatgcatttttcaatcgtatattgcgcgacattaccagcaccggaaaccgatacgcgcataccttcaaaccccatgccatgacgtttcaacatggcattgacgaaatagaccagaccataaccggttgcttccgggcgaatcaaactaccgccaaaagagagacctttgccggtaaatacacaagccgtgttgttagaaagctttttcatcatccctgacatgaaagccacttcacggccacccacaccaatatcacctgcgggaacatcagtatctggccccaaatgacggtacaattctgtcattaatgcctgacaaaaacgcataacctcgccctgactttttcctttaggatcaaaatctgaaccgcctttaccaccacccattggtaaggttgtcagtgcatttttcaaggtttgttcaaagcccaagaatttcagaatagagaggttcaccgatggatgaaaacgcataccacctttatatggcccaatggctgagctgaactgcactcgccatgcacggtttacctgaactttaccttgatcatctacccaacaaacccggaactggataaccctttctggctccaccatacgctccagtaagctgtattcacggtatttcgggttttgttcaagaaacggccaaagagaggtgaatacttcccgaacagcctggagatattctggttgatattcatccctgcgttgaatcgatccaagaaatgaagacaaagatagtaaacagctcatttagttattccttatttctacttcggttgtaatggcaccccagccattttctaataattatttttgtcgaaaatgtgaggtaagttgtgtttgccctttgaatatatcactgttctatattcatctttcaagaagtttttttgcagaaaggtaaaaaaaatttcttgattgcaccgggcataaactaaacaacactccatttcacccaaaaaaacgcctgcataagcaggcgattttatcgaataacttttcaatctgttgtcattcatcatcacgcagaggaacaatcagcatatcaacatgcaccgtgttaattaactgacgagcagaagacatcaatttgctccagaaatcctgatgatgaccgcaaacaaccatatctatgccatatttcttaattgcatcaacgagtacttgccccagatcaccgctaccactcagggtttcctgaatgtcataggctgaatctgccgagagagctttcagcgcactgcgggtctcctcagaaatacgttgctgcatatcaccgagattaacatcaatcaaaccggtgtagagatcggaatagttaacatcaacatggatcagggaaactttggcattgtccggtttagccatagaaacagcttttctcaccaaaacctgactttccggggataaatcaaccgcaacaagaatatgtttgtaagccataagcgaactccttccataatgccgagttagtgagttggcagggcaaattgccactatcctgtgtttattactactgagaatgttcttcaaaattgtttcgatcacagcccatcatatttaacgactgagcaaagaacatccaccaaacaaacaacatataccacaattgctcttcctgctacttgatggataacaaaatcctactctgaatttatagccttccttgaaactcaatagatttacgcgaacaactaaccggtctctctgggattgcatggttggatagaactgactagatgagtgtttatgacgtttttccaccagttttgtcccaactgatacaaaacaggttttttgtactatctgactatctttcctacaataaatataaaggtgtcaccacctgcaattttgattttttcttttctgtgacagctctagctaaccattctaaggaggggattatgttcagtacaatcgcactgttttgggcactgtgtcttgtctgcattatcaatatgatgcgctacttctcttcactacgagcattgctgtccattcttcgtcaatctgatcccttgctttatcaatcagtagacggtaacggctttttcactacacatgggcaacttaataagcaaatacggctagtaaactatatcaattcacaacgttaccttgatcaccatgatccagaagttgttcttcgttgtgaaaggttgagaaaacaatttattttgaccagctcactgagtggattagttgttatttgcctgatttctatgttgatttggtattaaatagaaaggcggtatagttaacccataccgccttcaaattattcatcaaaacaattaaatcagtttcaaagcgaaccagtaaagcgtaccagacaacccgattgaaaccggcagcgtcagtatccaagccaacatgatattctggatagttttaccctgaacaccaccgccatcaaccaacatcgtccccgctaccgcagaggaaagaacctgtgtagttgaaactggcatcccggtataactcgccacaccgattgaaacagcagcagtcatctgagctgaaacaccctgtgcgtaggtcataccttttttaccaatcttctcaccaatagtgactgcaacacgtttccaaccaaccagtgtccccaaagacagagccagtgctaccgcaatgatgatccagactggtgcatactcaacggtgtgtaataagtctttccgcaatttattcaggaaacgggcgtcttcagcacgggtttccggcagtttagccagagactcagccgtatcagcaatacacatcaacatgcggcgcatattgttacgctgttcagcattcagctcactgtagctctgaatgccttttaataggctttctgtctggtcaagaacaacgacagcacgcgtaatatcacaatggaatcgcccttccggttcatcttccgcaacaacgaccgatggcgtcagttcaattgcatgggataacgctgcaccatgctgctgataatattgctgcaagtgagtaatggcatcgtaggtacgggcaatgtcataaccattagcattcatgtttacgacaaatcccgctggagctacaccaattagcaccagcataatcagaccgatacctttctgaccatcattcgccccatgagagaagcttacacctaccgcagataaaatcagcgcagtccgtgtccagaaaggaggtttacgcttaccatccttcttttcacgttcagcgggagtcagatgaatacgtttacgtttcttggtgctactccagtaacggcgcagtagaaacacgattgcccccgcaatgatcaatccgattaaaggagagaggatcaacgacaggaaaatctgtatcatcttcggcacattcaacgcatcaaccacagaagaaccggttacgatcgcattggtcaaaccgataccaatgatagaaccaatcagggtatgagaactggatgcaggtaaaccgaaataccaggtcccaaggttccagacaatcgcagccagcaacatggaaaacaccatagcaaggccatgagcagaactgacattaagaagaagatcggttggaagtaaatgtacaatcgcgtaagcgacacttaatccaccaagaagaacaccaaagaagttaaataccccagccataacaacggcgaactgtgctcgcatagcacgggtataaataactgttgctaccgcattcgcggtatcatgaaagccattaatggcttcataaaatagcacaaacagtagtgccagtactaacattaggctggtgtgaaaatccaggccagtaaaaagatgtagcataaacgttaagccagttagttggacatgaacgcggcgcattatcagtgacaaatgctagcgggggaagtgaaatatgaactttttttgatttcatgacaactagataacaataagaaataggaatactccttatatatcattaaattacatatcttttaaaaaattgacaattctaagttataaaggactttttccctacaaacttatcaaaaatacaacatattaggggatattccccactaaattatttagtcataaagagaaaaacagtggaaaaatttgatgcggtgattattggtgctggtgcagcaggtttgttctgtgcagctcaggctggacagctcggtttacggatactcgttctggataatggtaaaaaagccgggcgtaagattttgatgtccggtggtggacgttgcaacttcactaatatgtacacagaaccatcagcttatctttctactaacccccatttttgtaaatctgctctagcccgttatacacaatgggattttatcgaactggttcagcgtcatggcattgctcaccatgaaaaaacactggggcagcttttttgtgatgattccgcccaacagatagttgacatgttactgaaagagtgtgaagccggtcaggtcactattcgcctgcgcagcgaagttagccaggtagaaaaaaatgagcaaggttttgttatcatcgttaacggaaaagaagtaagtacacgctcacttgtcattgcttccgggggattatctatgcctggtcttggagcaacgccttttggttatcggattgcagaacagttcggcatgaaagtcttgccaacccgcgccgcccttgtaccttttactctgcataaaccactactggagcaacttcatatgctctctggtgtgtccgttcccgccattgtcactgccgaaaatggcgttctgttcaaagaaaatatcctgtttactcaccgaggactctctggtccagcaatcttacaaatttccagttactggcaatcaggagagtttgtaagtattaacttacttccagatagtgatctggaagcccttctggagaaagagcggagttctcacccaaaccaaagcgtaaaaaatgctttggcaaaattattaccaaagcggctgacagaatgcctgcaagcgctcggtcaaatcccagatattgctcttaaacaactaaccccaaatcagcaaaaacagttggcggtaaacctccaatcatggcgggtacaacccaacggtacggaaggctatcgtacagccgaagtgacgatgggcggtattgatactcatcagctttcatctaaaacgatggaagctaatcaggtaaaaggactctactttattggtgaggtagtggacgtcaccggctggcttggtggctataacttccagtgggcatggagttccgcctgggcatgtgcgcaggcgttgtgactgttgtggagagacaataaagtttgcccgtaagagcaattttccttatgttcttaccggcaaccatatatgtgctctgaacaatccagtcgggtttaattgtccagtcatgcctgtttttttgccagtctgtaatcgcatttaatgttgataagctaccacccataatggtattggcttgttatcggcatacagtgggtcttgagggtatgtccatttagtggatgaaaaaacagaacgatcgaatacaacatcaaaattgcaattcatacatccaccattaattattttttttaattaaaaaagtataataaatcaatagagttatcaagctaattagggataataatgaaaacagtagagtagcattaaataaatcaagcatgatccctccgtaaataggtgctaaagctgctccgatacttgacatattagaagcaccaaaaaaagctcctcttaaatggtgaggagtgagcctatcaacttcgacattaaacgtaggtatggcaactatttccccaaaactcagaatgacagttgcgacacagagataataaactgtattaataggtgagaacgcaaaaatgatttgagctatggcaattaacacgataccaattaatatttttattcttggtgtaaaatttcttaataaaattaaagttgggatttgcaaagtgataattgtcaatgagttgacaataactaataaagcaataaaattggtaacattgttgatatttgatctagataaatactgaacaagcgtagaatcaaagttagcataaacaaacataacaagaacattacataatagaagtatcacgaatgctcggtgagaaataattatgttcaatgtttttgtaaagctaatgtcattgctgactttttttattttctcttccttttttgaagataataaaaagacacgcaacataataccataaacaaaataaacaatagctgtaattagaaaagtttctctctgtgccgatagaccagaagctaatccaatataaggaccaattgcagcgccaacattgatcaaataatatcgatagtattggattgactctctttctttaggagagtcaatataatcgccaattaaggctttactacacgcttctaacaaagcacgaccaatactaattccggatatagcgattaaatataagataggtgaagatgagaaggacatcatgatgaacgaaataatgcttatcatcaccccgataagcattattgttctgcggcaaaaaatatcagataaatatccagtataaatgcctgtcactgagcctaagatacttgatagcgccaataatccgccaatccctgtcgctgacatgttaaactgccgataaaggatcatcgctaaaaaaggccaaaccataaaataggcggctcttgttaacagtgtccccagtaacatgataaaaattgggggaggtaaatgttttaataaagataatctgaatagagatgccattggttcaccaggatacgtattgagttactctgacgctatttctataataatattttctttaaggtggtgactttcaaattcagcctgttccgctgttacaccacacgcaatagcatattctaatcgttgagaactatttttcagtgactcaatatgttctccaacgttaacatcaaaatggataaagccattctttatgtaatttacctttttaacaatgccagaaggtgctgtgatataagaaatagcggcatatttactgaacttcttactcaagtcaggtgaaatatttaacgaaacttggataactgctttccacatatcaataccagtagccatttccactaattcaggaatatgatctcctcctaaccgagctcctacttcaatgactttgacaccatcacttgttaccttaacctcggtatgtcctcccccattataaatacctaacgcgaacaaggcttgagttaccactttttctatttcgattttttgttgtaatggtatattagcaggcaatgtatgccctaattcaacaaaataaccattacttgatacgtattttttagtaattgtgacaatgttcacaacaccattaaaggaaatagattcaatactgtattcttgtccttctagatattcttctatcaaaaataaagaagatttttttactccaaatggaggagttatttcacagacttcacggaaattcctttccaattcgatgacattatcattacgtaaaacacctcgacttccggccatgttaataggttttataatgtttggatacccaattttggctgcttctatttttgcgctgtcaatattcgaaattagagcgtatttagggataggaacatttttttgcctaaaagactctctcattaggtgtttgtttctcgctctcaatgcattttcatatgttattcctttaagacctaatgtttctgctaccttagccacaaggggaacatagaactccataaatgtaataacaccctgtatttttttcttagcattgatatactcaaccatatttataacaagttcatcgtcattagtatctgcttcgaagaattcatcaatatagagtaaatcattatcagatactttattatagtacttccttgatccaatgaatataatataagcgcccagctcttttgctttttttaactcaatcgaaccggatggttttttttctattaccaataatctattagacatttttaatctctatcgatctactagagaggttattcattagctcacgagaaaaacacccattctttaacacaccgtttaatcttttattaacaagatcgttaatttcatcaagataaatatgaatgtcttggggctttatatcagtaacaggtttacttaatggtttatcaccatggaaatcatagacaatcggtttatttgtcatttttattttccttgcctagaatgtttgaaattaaaacttatcatttgcatagttattttcaagtgttttttgatagccaagaaaaaatatttttgtcacattaacggagaagtaagacagaaaaaacgatagtataaaaactgagaggcttaaattcaataaaaaccagatgcgataattcatattacagtatttctggaaagtgtttcatggaaactataatcatatccaatcaataaagaattgcggattctaaacttaaacttctttttagtggaaatgtcccccctcggacttatcgaccttaatcacccttctatgccacctgaactacaaaaacaaatattgcacgataggtatcataactgattgattgctgatgacttggaaacagggaatttctattacgatcgtcctaacttgcgatttataaccaatttaccacatagtgtaatgaatgacagtgagtgaacttttcgagagaatgggcgggacactgggcaaagctgtactaatctttatgaattacaagcttatcaggaactattgattaaaatcccgcagaagaaacaaagaatcatttagttacataagaatacagcaaataaaattcaccaattgagtaacagactcagagcggttaaccaattacttgccttgtgaaaaccacaggtcagctctctggccttattaaccattatctcattgcagcataaacccactcagctcagtgcctgatagcttcctcatcaaaatgtgacaagccaccaacaaccgttttgggatgggaaaaacgctcgaaccgattaccacactctgctttcaggaaagttgcaggccaagagagtgattttttaactaaacgcgtttcctggtcagataaaaaatttgtacgctaaataaccttctgtgaagctaagagaagcataaacccattgaagatatccagactacgctctgaaacctgtagggagccacgtcctttaggacgtggtagatatcaatgcccccaaagagcattcattggtactgcaaatgtgttcggtatgtggctaattggcaggcaattgttacctgtgtaaagtaagatgccaccctgccaatctctgtcagccaatgaagcttatgctctcgtctaaatgctggtttgtacagcgtctatttgctggctattccatcgtccaaatgctggttttgatagcgtctatttgttggtttcctttccgtctatttgtcgatttctgacgttcttacacatcagtcaaaacttttcccttgggcttaaaggcacgactgtaacgaaaaactagggtaattagaggaataaatctaacaataccagacggtagaggaatcgacgccagtgaactctgtatccagcacacagagaggataaggagcgtcagcggacttaaaaaagcttactgtaaagctgtattagtgaggaagccccaatcttgcattcgcaaaactggggcctaatatctttcgctttatgtcggggaactgagcatcatgacaggatgggagaaaaaccgtcgactggctatgctttggaagctctgattcacaagtaataaactgtcaacataataatagcggtttagccaccaagaatttattcagatcttatcacctaaactgctttcccatttttatcgaaaaagcattcacgatagagataaccgttgcacataaactgggcagtagttgcgtaataaaaccaagaatagttccgtgatttaccgaggaatgatgatgagcttctcctcccatagcaatttgcataaaaacagagtttgtcaggtaggcataaaccaaaccgcaaatccctgtaaccaacagaaagcttataagcgtgacgaccaccgcacccaccctccgaggtaatcttcctctgattgaattgatggtgagcacggtcaggcagcccggagcaaaaccccatcccaaaatataccaaataatcattaaccccttcagcgggatgctatgtgccatttctaatatatcagcgcgccataatataagattcaggcatgcagccaacacagccagaaatacggaaacggcaaagctattgggcaaagttaatttcttattcactaaaagaccttgagacgagcaagaaatctcgcaccagttactgagttaagaagaaagctgcccaaaatgccagcgataagtgcggcagtatatcctttaatcaggaatagcaacggcatttctattgaaccccaataattcagccccacgttgtggtccaagccccaacaaagtgtttggcaaacactgaataacagagtgctacttactgcggtcatgatataagcgccggtacttccaggcgtgaaacgtgctgataccaagtaagtcaaccccccaacggcggcccccatgccaataccacataaaccaagcgcccatacgagacgccataccaaagggccattatcgggaaacaaaataagccccattaaaagaaatccagactctgcgataaagcccaaagaaataaatagcttaatcgtgcgtatagctcgtttctcaccttctgccaccacatattgcggatctcgttcattcacgattcgagtagacatttttcatctcctgaataggtgtgttaaatatctgatgatgccattcagttttatccctctgaagtagactatacacgctgatgaatggtatatacccgttatccttcaagttgcctctttgttggctgcactcgctcaccccggtcacatagttatctatgttatctatgctcccggggattctctcccttgccgccgcgatgcatcttgaaatccatagggtataaactgagtcgaacgttatagcagaatgctgtcagagcgaaaaaaacacttcataaaatatttcgaaaaatgatttttggtgtattactgataactcctaattatataaattatcaatcaataatatccaagcaataaatgaatcaaattatttaataatgcaatcacataaaaaaagtgatgtaatcactatggtatgaggatgaaaatctgtcaatatggaataagaaattaataagataatccagcatatgggctttttaatattttgatatttctgccactcagcctgacaaaatattcatagcttaattaatgaattgcaatttatttcctctacctgcaatatcgccaaaatacaataatcaatacctaatattgaggtttgtaataataggaatattcaaatgcgacactattttagttttataatttgacaataactctatacttggttattaatttaattaagcaactaacaagataattgtttaataacctatatctatcaggagatatttaatcaccatgaataaatccgagcaaaaatttaatatcaacgaaagtgtcatcaacgtagatggaaaagaggtaaagttcttcacatcccaacctctcgatccaaataagaataacgccaagagaaatcctatcgtcctggtacatggcactggcggcagcacagagatacatttcggttatctctttcaactgcttgcctcggaaaatcaaattatatccctggatttttctcaaccagtaaaaacaaacgaaacgcttacctttgaacatcttgaaaaacaggtcgaagccgttattgaagcagcagcgttgggagagactgtcacactgataggttactcgctgggagctgttattactgcttctgttgccgctaagcgtccggatctggttcgtaatttagttctgatcgcagggtggatgaaaacagatttacagttagagcgatttttatctgtctggcgtcagttatatgagatccaatcaccagctattgcagactttgtaatgttttgcgctttcagcgatgccagccatgcaaatatgtctccagatcagtttgcaatcagctttgaaaatgccataccagaggaatttgaagcattacaaatggaccttaatggccgggttgatatcactcaaattgttcctacgataaaagccacaacactgattattggctgtacgcatgatcaaatgacgcccatccgccacagcaaagcgctgtttgctgcaattcaggatgcacgctttgcagagatagcgtgtggacatgcagtcgtttatgaacgtcctgcgcagttggcacaaattattgaccaattctgcgcgaacccttcgttttatcctgctggaaccataatcccttcagacctgccataatccctttaattctctggagagctatagcaggcattgctttatcaatgattgtggggaacttttagcggtcaagttgacactcagtaattttgaaacggcaaggggcttatctctcaaattcaaacctcttgccgatgccaacaattgcaattgttttagaatggcttagtcggcaaatatttcccatctagcgtaattacagctcgtgaaccaccattaggatcatcgacttttttgatatcaagtttaaagtcaatcgcactgataatgccatcaccaaactgctcgtggacaagcgccttaagcgttgagccataaacctgcaccatttcatagaatcggtaaatagtcggatcagtcggtataccaccggggatactgccgcgtacagggatagtttgcagcagaaagaaggcatcttcttcaagttcaagtcggtcaaccacaaccctcgcagcatcggcaggcaatgggtgctggccgagtagtgcagcagtgacgaatgcgagactcagaccggttccttgtgcaatatcctcgaacgtcaaattcttgcgtgccttggcgtcgatgatagcatcagtaagggccagccggggagtttgggagtattgagattgtgtcataatgattcctttggattaataagctatttaaatgccgtggtgaaacacggattgcgttgcagaaacatgcggatagtccgcaagggaaacaaattgaccggccaagccgtctaaagcatcgatcgaaccagcctctatgtcgtaaatccagccatgtagattcaagtgcctctgttccagcccgagtgccacggacgggtgggttttgatattagcaatttgagcgattacgttttcacgcaccatcgaatcaatttgagcagtctcgttaacgtgcacacgtgcctgactaatcgctttcgcacaatccgcatagcgtaaccagcttgtaatcgcgggcaggtgattcatacatttacagcttgcaattgtggtcatggcaccacaatctgaatgtccgcagatcacaatgtcggtgactccaagcacagcgaccgcatactcaacggtagcggaaacaccgccagattctgcaccgtacgacggaacgatgttacccgcattgcgtatcacgaacagatcacctggctcactctgagtcagaagctctggaaccacacggctgtcggagcacgtgataaacaaagtacgcggattttggctggtggcaagccgcttgaaaagctcgcaacgctttggaaatacctcgcgctggaattgtaaaaagccttcaataatatcctgcatgtcttcactccatcgtgatcgataagaaaacggatggataaagaatgaacgaatttatctatagcgtcaaagatcggattactatcatcgctatagtattttccaatagttcattgttattctgcagcgacacatttgttaataatccagtagtcacctctttttgtttcaagcactagcgtacagaacaacaaaccagcgttgacatgttcaggaagcccttatagtcttcactccatcgtggccgataagacagctaacaggtgaagaatgaacgaatttttctatagtctcaaagctcaggatgtcattacttccatattattttcaaatagttaattgatatgctgctacgacacattcgttatctgctggcagttgccgaacaccagaacttcacccgcgccgcagaagaacttcatgtctcgcaaccgaccctatcgcaacaaatcagacaacttgaagagtcactgcacgtgcaactgttcgaccgctctggaaggagtgtgcgactcaccgatgctggcgaggtatacacaagttacgcccgtcgtgcattgcaggatctggatgcggggcaacgtgcgattcatgatgtgcaggatttaagccgcggattgctcaggctagcaatgacacccaccttcaccacttacttcatcggccattgggtagaacgtttcaacgcactctatccaggaatttcgttgaatatcaaggaaatgacacaagaccagatagagatctctttagcggagaatcaactcgatctcggcatcgcgttctcagacgtacgttcccccgacattgatagcgaaccattgttcatcgaaacacttagcctgatcgttggtcaatcgcatcgatttattggtcaacaaacatcattgacggcgaaaatgttggaacatgaagggctagcgctactaagtaaagactttgcaacgcgaagccatattgatttgtacttccagaaacaggggatcaccccacgcattgcaattgaggccaactccatcagtgcaatcgtagaaattgtccgtcgagggcgactcgcaactctgttacctgatgtcatcgcccacgaacagaccgggctctattccattgcaattcaacctacgttaccgcaacgcaatgcagtactgttgtggcgccgtggtgcatatcgaagcgcggcaagccaagcgtttgccaatctcatcacacaccatttcgatgtacaccaagaaagtgacgatttttgataaatagaaaacacatcgcgtctgaccgcttcccttccgtattaggacagccaattcgtaagcttgtttctaatgtaatcagatgaaaggcgctcctgctctaaacgtgaagattggaaccggccagaaatgagatcattaaacaactttgcttcatcctcatttagcaatgtaggattagattcaactggatttggttcaggaaccattctatcttcatgagctttaacagttttaacatccatcatcagaggctcaatatccataaacttgtttctggcatcactgagaatagataaaccccaagtatcaatatctccccaataccctacacgcttacctttcaaccaagctgcatccatccaagcaatgtttttccccccgccgatcaccgctatcgtgtcagacatttcgggtaatgctaaaccagactgtaagttttcaactattaatatattcgatgccggaagttcatgccttctaagtaattcgctaggtatttgtagtatcggcattcccccaagcgcaacagttgcagcacggcaaagcggcctgatagttaaccagcctttaggatttattgaacatcccaaccaagcgataagaccacctgatgccgaaacagctcccttgtgaatgatatcggccagctcttcgatcaggatttggtggttctcaagaaacttagtatcaattccaatgagtggcagtgctcttagatattgcccttcccctaagccttgctttaattgtggcaacaattttgctaataattccgcatccctcaacgagagtttttccacaatatctatgcacttaaccaatgcaggatagagatctttatcaacccgcaaaaatggcttcatatttctttcccacaccttacttcgggaaagggcatcattccctaaaaattgaatcagacattgcatcgattcaatgacaacaaaagttggaatgcgctgttcagatagctccctgaaatttttggaagaccactctacaagatcttgatggggaaatgatttccactcatcaataaaccgttgaaaatgagctatatctaatatggcagaattccctttgggcggtttcaagccaacgcgaatagggaatgccttgatgcccagtaaccgggattttagtgaggaaaggttatcccactcacgttgcctaatgatgctcttaacttgtgatggcaataacccccaacgcacctcatactgccctcttttcatgtcagtttctcaaactcaatacccaaatcagccgcctcatcaggcaactttttctccttctcttcgcccattctccggtcaatctcttcccaagtcacttcacataaatggctgtcatggttttcctggtctctttccgcaatgagcagtgaacgagcagattctcttgccagattcaagttcttataaggcgtaatcaaattaacgtgaatatggagctccctaaatactcggagcacccgccgacttactgtttcagccgtatttgagaatgcttcatccaagaaaacagtacagtaaaccggtcgatcatagccatccggcgtcaaaacataggccaaacttgccgcgacaatagtcgccgcaaacgactctttctcgccaccggactttccactagatgactccaagacatcccgaatctcaccggtattactatccaactcttcggcataaaatgacatctgataacgaggatcaagcagccttaaactttccaatgtatttgaggagccaggggcactcgctttgccaagtatttcaactactttagccaattgacggaaccgtgcttcatggtcatcactggttacctgactcagcaccttacgcaaatgctgttcaaactcattaacatgcggaaatttctctctctttgaacctagctttaaatgtgtccctgatcgaaactctgtacgcttgaggacccggttaataatatcaatccgctcaaggatatcttcccgttcagattcaagcttagttttaatccgcgctagtgactgcgttgcatgcttattcaaacgttcaataaactgctccacaaggttgggaagcccttcctcttccagttgtcgtaaatgattaagataatcaggtaagccaccaatattactttgccagtcaaccgtgaagacttgccatttatcgttagatctgaatgagaccataatgctaatggctaatctttctgctttgtctttactgtttcggctaatatctaacagacgttctaaatcttcttcaactttcaacaccaattcagacatccggcctaaatcgtttgtattaagcacgccaacccgaatcgcaagtaattgtctggctgaatcaggtaatcctttcgacgcttttgcctgcgctttgctccattcttcttttgcatttttcagcgtatttttaacgccaccagaatcagagttgagctgatttaataccgattgaatttgaactagctgctctttagccgactcccaacgctctctggccttatcaagatcaccacctgactgttccaacatcttaaggtcaacctgcaaatcagaaagcttttcgtgccagtaaggagcattaatatcatcccagcggtaaccttggatcttctcccaaagaattttacgatcagaaacagaattcaaatcttgacgggcctgactcacctttttctcggtttccgccaattgcagagttaactcttttttatcgttattcagaatggctaaacgtgatttgtttgaaaaacccagacaccagcgtcttctgtcatctattcggtactgatcttttttctcaaagcgccctttatccatgtgcattaacccctgttgtgtcatcgaaaacggggtttgatccaattcttccgtgcttgaaacacattgcaggtcaaatcgttgcaaatggtgcttgagccactctcgataagggtgagtgcgccaaaccagtttccttagataaccatcagacttaaacaccaccgattggccttgagttgtagaattattcacaacttgaacacggacatgtaaacccgtatgccgagcgtttaaccaacgagtcaccattgaataacaatgatgtggcacagcaagtgttgttcgtaacccgcctaacgccctctctatcgcgccctgccagctcttttcacgatcttcgacatcgataagctcaccgataaatacacattgctctttacttaattctaaagaattaaccagttcatctcgcaattgctgatatttcacatcaatattggaatcgggtcttgcctcgatttcccgaatttcttgagagatatcatggatattggcttgtagctcactgaatttagcactgatggtggcaaacctgtcctgatactctccttcttcttgctgaatactggcaagccgagttgatgcggtggattgatttttgagaaataccgcctcctctaatacagaagggagagccagttcgttggcatgagtttgatattgagatgaatttctaaccacccgattcaactgagtttgggtatgatcaacttcctttcttagcgactctattttatccccaccaaattgaaggtactcctcgtgccttcgctcaaccagcttattcgcatccactttctgcccttcaacttggctaatttttagaagtagcgcttccagttcagcctcaatatcagtaattttttcactccacaattgtgcaaaaatctcaccaaagtagaccgggagactatttttctcagccattagctccgcaaattctttggttgttttttcgataattgagttgagttcaggtaacctggataagtgcaccttttgtgctcttgcatccactaattgactatgaattgccaccagatcagcaaactcttccacgacctttttagcatcatccttgaccgtactcggttccagtactaattcacgaatcaacccggttaaatcatcaatttttttcagacctaacgcccgcgataacagtgcaggcgcattcttattgtccatatacaggagctttcggtacaactcctgataatcagaaaaattatcatcacagcacgtaatcgtcggatcatcacgaagccattgcttgaatgcccgggcattaccgttcccaaaagcattaagcatttccttaagagtcagatctcttttggcaacaacataaacgcgtgtcacatccgcaagcacattcgtcgatttagtaatccagaaaagcgccgcaagcgtaatttttgacccatcatcaccctgatacaaagccctaagcccagtcaccacgccaaattcacgcttacttctgactctcgtccccgctccgtcatgggcagatccaaaacttccccgcatataggaaagtaaagtccggtcagaacgatcaccctgcgccgcagccacattaaaagttgcctttccggcaggaagcagcaaagccataaggccatcaataaatgtcgattttccggcaccattatctccagtgaccagcgttcccataggatcgatcaacgcggtatgcaagccattaaatgacccccagttatacactgagagttcagctaatctgatttgaccaacgtgaaataatgaattagccgaaagagtttgatcagtcattttcatctcctgtctattcctcttcatcttgataatcaacagcgtcgctgccatttttatttagctcaatacccttctctcccgccattttcaggtattcattaagcatgctttcgagaaattcagcgctgactacatagcggatcaccggcgtaatctcgaagcgatcctcgcttccccggaccgaactcaatatttttttcgtcaccattttatcaagagcgcccttgagttttcttcggtcagatttcgtgctgtttgtcagcggtaaaaacggtgtcagatgagattctatacgttcaatatcaatgataaccctttgctctcccgaagtttcccggtcctggtagtgtttacgcagcactaacagcaacaaggtatcgtataaagagagcgtccttcggctaatcagagagacaacctcttcatcatctatacccaatgattcagtatcttcctcattctgaaagccagcgataaaggcgacacctgctttttcatctaaaactaacctcaaatagacttctgacagatgtttgcgtacagcagattggtatcgacaaagtaattcaaacaatttagctttctgcgaagacaaaataacaccttgacgcagcaagctaaccagcacccggcgcgcatcaggcggcatatcactgtttgagttttcagcgtgcttactgactaatacatcatcagcctcacaggatgggctttgattgacaatcgaaaaagcaacatcagattcaacgccggctgtatctgtaagcgggtcatactctgattgagtatggtgttttatcaactgatcgaagaaccctgtcttctgttcttcctgaggattggaatcagacttaccaagggtagcgagggcaccattatctttattcaactttttacctaccatgcattacaaccctcactatatatatctctacaaccattttccattcaccatctaaagaaccaattcatccaaactgtctggaaacaggtccgcactcagcaagaaagtgggtatagacgcccgcaagcgagctccccgtttgtcactgatttcaactgattccttttcttccaataatgccgccccgacagatttggccactcttaaataggcaactaactcctccaaccctgaattaatcggctgataatttgcaatagacgcaatcgtcattggaccaaactcttttaacgtttctagcgccctctcagcgattaatcgaatttgaacaacatcaaggcaatccagcatttgcatactcggttcgcgagaattgagctgttcttcagcgtctgaggtatccagcttttcatcaggtgatttaagcagcatgctttcaggagagctaatacttgccgcgccaacgggcagtgacagcgttgttgccgtttgcaagtcataacctaagttcttcaattcaatggcgagtcgttccaattgaccaagcaatctatcaacagcacgattttcttgagccgtgccactctctatgtaagcacgcaaactctcttccgttcttcgcctgatttgaaaaactctgtcactctcgcggctcagttctctcatgagctgacttaagaattggcgttgttgggtacttaagtgttctgcgaccggacgacttaaaatacttcgaagctgatctcgtagctccatcgttctattttgatcacataacaaatcaaaaaagctttcaaacgcactaccggcatccgttttagccagtaatgcttctttttctaaaacagcaagaaggatatctcctctggtagagtccccctcaataatttgaatacgaatttcctgatccaactgacgaatttcatcttcaacacggcgaaaatcacccgttaaaacagaagccagttggtaaatttcacgaattctttcccgctgctcagccttggttaattcggtcacaacgccagccctcagagcatcaatctctctctgaatctcggattttctatcttccaaaaacgcgacacgctcatcggcatttgggctaatcgctattgcaaagtccctgaccgcttcctgcacaattcgaagatgagacgcagtggttcctgaattgcgttcatcaagcccttggctaaagcggagtgcaatttcactggcatccgttttagttaatgtgtcatccatctcacgcaaccagccttcccgaatccatttattgagataagtacccgctcctgtttcagtttcccaaaggccaagttcacgacagcgtaccagctctgcatcaagtgacacccgggcacgactaaaagggacttcactatcctcggaaaataactcccccaaaaatgccaaaattacaggagcattatcagctctcaacagtttccaggcagcgctttcctgaaatagacggcggtactttgcctgtaacccttggaaattcaacttgcctccctctatgtggtgataagtaaaaaaccaccaccaagaattttgtataatttacaatcgaataaaactatatcatcatatttttttattatgtcaacacaaattactggcttttaaactattcagcgctgtgacccatgggaaaattaagcttataagtccacccaattttgtgaaaaaagcagcaacatgatgaaaaacaaaaactgctagcgcagacagataataaggagataaacaatgcctcaattatcatcaacaagaaaagtagcaggagtaccctttcaaggtaaaaatgggcggtctggataaaccgcccgatgtaaaccaatggaaaattcctacgcgttactttctacggacaggcaaaccaataccacgcttcccatcttgcggtaaaaccagcacggctactgaccaagccggcagcgtgaccgtgccatctttcgcaattctggtccccgccgccagagatgtgtggcccagttccctttgaatatcattcaacttcaaccctttgacgttaagatctcttactgtggcaggatacggagccgcattaatcatcaccaccaaaccgtcaaatcgcgaatcacggtcatcacccgtagtattaccgtcatctatggtcatcaccagcaatccaagctgctgatgcggcccaacgttacggaaatcaacacgttgtttaaccgatgtaccatcaccaagcgtcatcagtggtgaatattgacgcaaacgcagcaattcctgataaaaagccgtcatctgtaataattcagtccggcccggtttatctaccacatttttcactttttcaatcaatgcgtaattttcgccatcaacacgctgatccggcataccaacatcatagttgttatcctggtaggtgtagctaacacggttaaaccaatcgccggaattataggaatcacgggtaaaagattttgaacgtagtagctccgatccatgttgagcaaaggccaatccttgtccaaggaatgtcgtggcgagggatattgcctgcatacgaacccgtgttgccagattcgcctcacgggccgctttgtagctgattatatcccacagcgtttggttatcgtgcttagagacataattaatcacctcaattggatcagcggcataaccggctatagcccctttgtagttaatttcccgacccgtttttaccgccccatctttattaatcagcacaaaatcagccaaattgcccgccatgccaagacgtaccagatccgccagatgacgcgtctcattagcatctaaccaagccatttcgttcagtaacgttcccgcaccgttgcccaccccctgattaatacgaatagtgtcagcagaatcaaacggcccaccaccttgtaccgcatcgcgcagtcgatcagagaaagtaccaatcccagtgcctttaagattaatctgtgaagcaatttcgaaacggtcatcctgcccagagttccaaccttcaccgaagaagtagaccgatgggttaattgcgcgtacttttgccagcgccgataacatctgcgccttaggatggtagcccattaagtcaaatcgaaacgcgtcgattttatagtccttaacccaagtcaccaacgagtcttcaatgagtttagcgaacatgcggtgctctggagccgtatcgtgacaacaagtgttagattcaacattgcccgtgatctcatccaaacgatgatagtaccaaggcactaccttatctaatactgaggatcggtgcgccggcccggctgcgttggtatggttatacgccacgtccatgatcacattcatccccaattgttgcttgatggcctgaatcatggcgcgaaactcgtttatacgtaccgaaccttccgcatctgtagcataagaaccttccggtaccgagtaatgaaacggatcgtagccccagttgtaggagtcggtttctgcaatcattgcattcagctcttgtacctgcgggttattggcgttgtcaccgcgctgcaatgcctgtaatacctcacccacagtctgtgaaccactgcaataattcgcgaagcggctatttttcacccttgggttaacctggcacaaacggctaaacgggtgattcagatcagccacttcattgctgaattcattaatggaagccacatcgaataccggcaatagctccatatgagtcacccctgcctgactcaatgtcttaaggtgtttgaacatatcgctgttgtcagcggtgagagccagatatttacctcgccaagtttctgttaccgtgccatctgcaacagagagatcacgaatatgagcttcatatatggtcatacgcgcaatgtcagccggtgtattttgcgaacgcggcatgatcaggctatcccaattttgtggtttcagtgcctcgtcatccaaattgatgacttgactgtactccgaattggtagacaaactgtgggaatagggatcggtaacctcataatgctccacatgacgggaatatggatggtataccgttaaagcatagcggtagtaagcaccaaccagctctttatcaccttgccatgaccaagaaccactagcaggatcacgcttcattgcatgattggcaatgatctgtttatttgcatcatagataaccaacccaacatgctgagcagtcggtgcccacaagcggaaggtaacaccggtatcgttgattagtgctccatattctagggtgtcagcaacgttagcgaagcggtcgtccagcacaccagccgtttgtacttgagtcgccgacaatagcaagccagcttcattggtcgccaacgccaccaactcaccggtaagcagtgtatcaacatccgtgtcctctggcaggtggaacgctgttaacttcttcaagtgcgggaatcgctcagccgtcttctggctcagagtcgtcggcgttaacgtcagatagctatcgatgaaatttccttcatcattagcttccaccttgccattccggttgtaatataagcggacatagggcttatccgcgccacccgaccataacaacgtctgattatcgacccaatgtgccgaagcctgagaaacgccaaacacagaattaaaggctgccgcacgactgccatagatttgataattgccgggtatcacagagacggtacggttactgaaatcggagaaggagattttcaggtcactgtcgatcaatttattattgttaccatcacgcacgataaaattgatacagccctcgttcttggttaacggtatcacccagtaaggcccataactatcgctacccgtcggagttgcactggtgtcgttccagcttgatgaaagggaagccaaggcatcacaatttttatcgttccataagtagagggtgttggtactgtagtcacggttcgttgttgggctttgacttaatttagcaatgtccaccaagtggatcactgcctgaaaattgccggcagtggcagcttcactgggtactttattagggatatgcgccatcggtttctccggggttttgggtaaagaacgattgttatcacagctagccagtagcaaaacgaatgtactgcttaatagggccaggtaagcccttttccagaagggagctaccataatcagacctttttaatagaaataaatcgtcgccgatattattgttaataaaataggaatgaaatattaaataatgtctcagatgagtcagcatcctcctagctttgatactaagagggaggaggagttaggaggagatactttttcgtgatattgcgcacaataataatgtaatgatcttttattacataaggctggtgtgaatttatttatattattccatcagatacaggttaaaatgatgtcaaatacagtcatttttatatattttcacaaattttattgtttctgcaaaaaagcattttttgtgatacaaaatcattaagtaattcctttcctcctaatcctgcatgtttcttgcattagatatatacccgccatctttcaagtttcctctttgttggctgcactcactcaccccggtcacatagtccgctatactctcggggattcactcccttgccgtcgcgatgcatcttgaaatccattgggtatataaagtcgctattttaaaataaagctgaaactaaacatgacctattaaccataaataaaatcaatgagcggcaataacttcattccagttattgcctctgtgcaaattatgataatggaatatattaaacctaaactctacattcctaagtagaaatagatatttaattcattatcgttaccccgtacattttataaatcgttatgattaagataaatctgatgaaattttctgaattgcatcaaaagcacactgttgatctaaagaaccactcggagcgccaccaataccgattgcaccaatcacttgattatcactagatttaacaggaacaccaccaccaagtaataggaagcctggaatatcccctaaatattgagcaccaagatttgattgcgccgttttcattacgtcctctgacgttctctgagtagataacgcggtataagctttcattttgctcgcatcaacggtatgcaatccggctttatccatacgctgaaccactttcagaaccccacttttatcaacaacagaaaccgttacgttgtagttattagccgcacaagattgaattgcttcagaagctaatttatttgctacctcaagagtaatattacgttcagtaattagtgatgaagcaaaagcagattgagcgaataaacctgctgccaaaacagtatagaaaagagaatgtttcataggtaaacctcattaagtttaagttgatgaattatcctgttctaacttaatgagatttatcggctatagctattcggccaattacttattcgactcagtagaaatacttagtcataagataatgacttaaataattcatactctttgactaactgtggtaaagaatgtatatccaatttatgaaatatattggcacgatgaacctcaatagtacgtggtgataacgataactgttgagcaatttgtttgctggttttaccttccaaaataattttcatcacttccctttcacgttcagataattggctaaatttcgttttcaactgctcatatatctgacgttgcctaaatactttctgatgaaataataatgcacttgaaactgtttcaattaataaatctgcatcaataggtttggttaaaaactcgaaagcaccgtttttaaaagcgcgacgacaaatatcaatatttccgtgtccggtcatgataataaccggtaatgtactattaagttttaaaagatcggcctgcaatgccaatccaggttttcccggcatacgaatatccaataaaatacacccctgaagcactgcaatattctcgctatcaattctatcaagaaattcttgcgcaccaggaaatgaacttacctgccaattcattgtttctaataacatagataatgagtcacggattgcttcatcatcatcaataagataaattactgtcgccattatttctccttacctttattagttggtaaccaaataataaaacgcgctcctcctgtttcacaattttcagcattaatatcgccaccaagtttatgaattaatgtttctgttaacgtcattcccaaccccataccttgctggcgtgttgtgaagaatggaataaacacgttctttaaagcttcatcacttaatccagggccaccatctgttatcatgatttttatcatgtcatcgatataggtgatatcaatacagatccaattttgatattctgaccgaccttgctcttgctgtgcctgaatggcattgctgattaaattatgaaatatttgttcaatccacagcggttcggcagatatcattggtagttcatcacaaatatgctttattatcttgatcttaccgaccttaatttcattttcgagcaatatctcaactcgacctaatatcgtttgaatattcacaggttgtaaaataatattaccggtcgtcagtttttgacggtattgcgttaataaatttgcgatgcgttgagtttgcaaaattgatgaatccaatattggcgtcactttatcatattgctgctttttcattaaccgcaatgcggtttggttataactcataatcgcagtcaaaggctgatttaattcatgaacaacacctgttgccacttcatccattgtatttaatcgggtaaattcaaagaaatgtgctcgtaaatcagaaattttcctcaaccttttattcttctgaattaaaaagataaaacagataatcactgcccataaaaagctcagacaagcaatataaccccacggaattttagaccattgttgatcgttacccactttaagcacaaaaggctgaaaacgattggttaactttttctcccagcgccaaaaatagtgatctttctccagtccatacgtaatcaatgggcgattattccaatccagttgtaccattcgaaattgtgacaataatgatagatcttttatcaggatattaagatctattaataaccggatattatcacgtttactattaagccaatatcttccctcttcctcttcactgactatagggaatattaatacattcattggcatctcttgtaatccgacgatttgtggaaagttttcctgtagctgctccaattcgatattagtatccgttagcgatacaatcgcgtcatgttgtgccagcttttcactcagctctcgataaagaatattaaatgaaactgtttgttgttgataattctgatttagtgaatgattaatcattccccaaatagtcaaacctgttaacacaatccacgccaaaaaatgccacatatgattacctgaaaaaatatctttcatgacgttaaaatacagtcagaatatataaaggaaacggctattaaacagaatgagttgaattctagagaacatttggcattgagcagcatattaaaattcattatagcgtgattatttcatcaaaacatttcttaaaataaatagttggctatggtaaatgaaactccagctctagcttattttgtctaagcatattttagctcctgatcaaattatttcgacagatagaccccagatatgggtttacgataacccctgtcaaagctcttaatatcatgtcaaatttactgaataatctaagataatcacccaataaatcgacttggtgaaaggttttctttcccttgggtatcacaccgatatttataaaaatagcaatatttatcaataagttgagatgaaacctcatcattattctatatttgaccagaaaaaacgctttacaatcgatagtgataattattatcattcgtatcgctttcagatgaactgccttcggggtacagatgaaagcacgacattgctcacattgcttccagtgtttactttagccagccaagtgctggcttctttttattaattcatccaatcatccattgttcaaaatatttgaatttttaagtcaagtttttaagctttaatgctatctcttctcaattagactgtaaaaaccattgaggagatttgaatatgatccatttacgcaaagcatcagatcgcggccatgccgatcatggctggttaactagctggcataccttctcatttgccagctattacgatactaattttatgaatttctcagcattgagagtcattaatgaagatttcatcgaagcaggtcaaggttttggtacccatccgcataaagatatggaaatactgacctatgttctttccggtaccgttgaacaccaggatagtataggaaataaagagcgggtacctgctggtgaattccaaattatgagcgcaggtactggcattcgccattcagaatacaatccgaacagtgattgccaattacatctatatcaaatttggatcatcccaagtaaaacgggtttaacaccgcgctatgaacaacgtcgctttgatgatgtacaaagccgccaactggtgctctcgcctgatgcacgggatggttcactgaaagtatttcaggatatgactttatggcgttggatacttaaggatcacgaaaccgccgaatatgtcgcagaaaaaggccgttatatttggatacaagtcattcgtggcgaagtgacggttaatggtgtcaaagccaccaccagcgatggtctggctatccgagatgaaatcaatcttcaacttagcagcagcaacgatagtgaaatattgttgtttgaccttcctccgacataaatatcaaataagcctcaccctaacggatgaggctaaaaaattcacaattacagtttaggacccgctttcactaaagcttcccccgccggggtatcggtatatttatcaaagttgtcgacaaaacgatgagccaaatctttcgccttctcttcccattgagatttatctgcataagtcttacgtggatcaagaatgtcggtatcaacacccggcaacgctgtcggaaccgccagatcgaaaataggtaatgtaatggtatcagtttcttcaatatcaccatttaggatggcatcaatgatcccacgggtatccttaatcgagattcgtttacccgtcccattccagccagtattcaccagataagccttagcacctgcggcctgcatacgttttaccaacacttccgcgtattgggttggatgcaaagtcaggaatgcggcaccaaaacaagcagaaaatgtaggtgttggttcagtcacaccgcgttcggtacctgccaattttgccgtaaaaccagatagaaagtgatattgagtctgttcgggtgtcaaacgagataccggaggtaacacaccaaatgcgtccgcagtcaggaagatgaccttagttgcatggcccgctttagaaaccggcttaacaatgttttcaatatggttgataggataagaaacacgggtgttttcagtttttgaaccatcacggaaatcaaccgtgccatctgtcagtacagtaacattttccagcaacgcatcacgtttaatcgcattgtagatatcaggttccgcctctttggacagattgatggttttcgcgtaacaaccaccttcaaagttgaatacaccgtcatcatcccaaccgtgctcatcgtcaccaatcagcttacgttttggatcagtagaaagtgtggttttacctgtaccagacaagccgaagaagaccgcaacatcccctttctcacccacattggcagaacagtgcatcgaggcaatacctttcagtggcaacaggtagttcatcatagagaacatccctttcttcatttcgccaccgtaccaggtaccaccaataagctgcatacgctctgtcaggttaaacgcaacaaagttttcagagttcaaaccttgttcttgccattgcgggttggtgcattttgcaccgttcatcacaataaaatctggtttgaactcagccaactcttcatctgatgggcggataaacatgttcttaacaaagtgggcctgccacgcaacttctgtgataaagcggactttcagtcgtgtatctgcattagcaccacagaaagcatcaactacaaacaaacgtttgcctgaaagctgcttagttaccaagcctttcagatatgtccatgtctcctgctgtaatggtttgttatcatttttaccttttccctggtcagcccaccatacggtgtcacgggtgacatcatcacgaacaatgtacttatcttttggggaacgacccgtgaagatccccgtatcgacagccacagcccccaggttggtcagagtgccactctcgcagccttcgagtgaaggtttggtttcttctgaaaataacaactcatagcttggattataaataatttcgttaacatcatggattccgtaacccgcgagttcctgcggggtaatgcctttaacactcatgtcattgctcctggtgggtagtcacactttttctgtgagcaataataaatagttatgattaattaacagcgatagttatcaaaaaattgaaaacccaccatttttttaagtttgatcttgggccaaaggcacgaaaacagttttgagtattatgatggatttgatagaaaggcgcggatccgcgccttaaaaggtgaaaaagtgtgtttataccctatggaacggatatagatagaatatcaatggagccggttctttttttctattctgatcgcagcaagatcatcagcatcaaaaatatagtgcgtgccgcaatactcacacgccatatcaatgttgccatctttctgcaaaatatgattaacatcctcatcggaaagtgtcactaatgtgtcagcacaacgttggcgagagcaagtacaacggaattcaaccgcttgcggttcatataatatgacatcctcctcatgataaaggcggtgcaagatctccttaacttccaatgaaaataactcttcacctttaatggttgcagtaagttgcaccagatgatcaaaagcttctgcactcccctgttccgctgttggcagaatctgtaacaacatcccaccagcagcaactctgccatcttgaatgccagtacgaataaagagacgagtcggtagctgttcagactgtctgaaataatcatcaagacaatccgccaatgtttcaccttccagtgcaaccactccctgataacgctcaccatgagttggcgtaatggtaataaccatatagcctgtacccaccatctgtttcaagctgctattttcagccactaatccatcaatacgagcaacaccacgcatttgttgctgatgattaccattaataacggctaatttgaccgggccatctccctgaatctggaccgtaatatcgccatcaaatttcagggttgcagttaataggctggttgctaccaacagttctcccaataattgctgtaccggctgagggtaatcatgattttccaaaatatgctggtaagtttcactggctaaaaccagctcaccacgtacagaataattcttaaataaaaagcggtgtaattggtcttgtttaaacataacaatctctcattcgagcaggttattcctgcccatttaatttggtgtttttaaacttaatcagcgtgcgtctttcttttttatccggccggcgatcaggatgaggcatagttaatgcattcatttttcgagcaattgccattttttcccggttagtcatactcgcttccgtctcttggtaaagttgttgcgcctccggcgcaccgcgccgatgattgcttagtacaagaacttcaactatacgttcatcattaccctgacgcagtttaatttcagcccctagctcaaccaatttactcggtttacttctttgaccattatagtgaactttaccaccgtctatcatttcccgtgcaatagcccgtgttttataaaaacgagccgcccacagccacttatccagacggacagcttgatcggagtctgaattacccttcatttttcctcctactatcagctttgatcagctttggcaaataacccaaagcctaacataccattgtcgattatcgccaacgcgtaggcggaaaaagtgtattaaagcagttatcgtaatattgcttgattttgtttagacgttgtttgttctgcctatttttcttaacaaccagcacaaaattaatgattaaggtcgtaaaaagagccaagaataaaatagtggtaccaatacaacgagcaagtgtcatggcatctagttcactatgcagcacaatccgacgggttccatgactatctacggacaattccgtgacaattcccgttgtctcaaagggtgtttgcaataccatatccgataaccgctgtaactcacgccattgttccaacgcactatggtcttccaacacactatggtcataagagatgatggccggcgttatatactcaaccagttgtttgccttcatcactgataagtagaactccgccaggagaagggctattaagcagcattgcgactttatctatttcccggtagataaatgatgatgtcgtcgcatcaaccaatttccccaaagcttcagcgcctgccggacgcaataaaacatgagtgccatccagtttgccactttctgcattctttaacaaagttagccaatcaatagcactacccaggttaaccaaagcatttttcaatcgtaaacagtctgcttctttctcacataattctttagttttcaatacaatatcagagaaattatccaataagatcataccagatttgaaaatctcctggggaaggtctggatttattacatcgttattttcctgtaaacgtaattgcttattaacagttgcaatcagtttagcggcattttctataatttctgattctggtattggcagtggattaactctattccaatatatccccgagcaatcgaacggagaaaaataggtgtcgcctttaccgttcatattgtttgggggcatataacacataccaaccccttttgctttcaggatatccccaactcgcaattccatcccttccatcatattagcgtcagtaataacttttgtgctgctgccatgcaaccaagcaaaactgagtttcatcggtacactaaccggctgataaaaatagagtagtaacataataagcaagcagctagcgatcatcatgagattttttccataacggcgataagggtaatttttctcttcatcatgcaaagagagataatgcccttgcctgactacctgaccgttagtgtaaatatcaatactggttttctgatcaaaatagtaagcaacatagggttcccaatgaggaggatagattaaatcaatcccaccaagagaaatattactcatttgcccttgttcaaattcgccaaataatccccatcgtttgggtataccggtaaaacagtgaatatcctggcgcctgcatattgaaagtgggcaaagtaatggccaaaaactgacaacgactaaactacctgcaatcaacatcagccacggcaaaagcagtgccggtgaaagtaacgcaaaaaaccaaatgaaaaatccgaaacacaaaaatcccccttcccaaatacccgatgagtgattcaaccggtattcttccaaggtctctttacgaatattttgtaactttacgctggtttcaccatttttttggatcgatgcctgctgatgcgatatatctgcgattaccggagcagaaggaaaatcctgttgaaaatctttcagaaagtgaccattaatcgaaataaccagtggtattgtcgcggtgtgaataacatcaataatattctgctgtttaataaaaggctcaaggaaaaacggcaaatgaatttctgccatatcaatataataacgccagctatgtcgttcatctgaggcaacagaaaaccgggtaatggaatgacagatagtataaaccatatcatttttacccatcagaattggccaacttgttttattaatacggtttgttacaactggcggcaacactcgattcaaataacattcaatagcctggtattcatcagcattaagtttacgataggtcggtgcagcaacagaaggcagatagcggtcattatcatgtagcttccatttgaagatcagaaaggaagccatgacaatcaagctaattatcaagatagccaatataacgactgttacgctcattttatccccatacccatgacaatcttactattgttgtttgcaaattagcgactacacattaagttctgaattaggttatttctatttatttttttaatttattttacaatgagttataccctatggatttcaagatgcatcgcgacggcaagggagtgaatccccgggaacatagataacgatgtgaccggggtgagcgagcgcagccaacaaagaggcaacttgaaagataacgggtatatatgataactcgctaaactatatacaacatagatctatttccagagaggataaagataacagtaacaacaataaccagcgataatcactatcatttatcaaaataatcggccatatttagtcaagctatggagtgtacctaatttcatcataaaatctaaggttaatgaaataatttaagacgtaataatgcacaggcactcaactcaaccaatattaaaccatcaggggcaattatgaatgacctgaaaaaccctaaaatcctcaacatagaggacattgcccattcacgtttatttcatattcagtcagttgatctcgaatttagtaacggtgtaaaacgcgtttatgaacggatgcgtccggccaatcgggaagctgttctgataatcccggtcattggggaggaattgttgcttattcgtgagtatgcagtcggcattgagcagtacgaattgggctttcctaaaggcgcgatcgacccaggggaaagtatctttgaagccgctaaccgtgaattaaaagaagaagtcagttttggtgccagaaaaatagaacaattagccaaactcactatggccccatcctatttttctagcaaaatgaacattgttattgccgaaaatctctatccagaaagcctggaaggggatgagcctgaaccgctatcacaaatacgttggccaatagcagatatgatgtcattactggatcacgctgatttcaacgaagcacgcaacgtctgcgccctatttctggcacaaaaatacttaatacaccgttgaagttcacaggcacaacagcgcttccgttgtgcctgctctatcatcagaatagctcctgactttcaccattctcaattaaaattgtgccaacttcctgcaccgcactttctgtaggttgagtgccgtcaatgaagtattcactacgggtatctccgccgccgccagcaagtttacctgttttacgatctatcacggcagaaacaatccccggaggaggtgtaacttctttttcaggaaccccctccagtgcaattttcataaaatcatcccaaattggctgcgcactcttagcacccgcctcaccgccactggctgctgtacgaccaaggcttctacggtgatcatcaaaaccaatccaaaccgtcgtgacaatatccggcccataacctgagaaccaggcatcttttgaactattagttgtcccagttttgccaccaatatcacgacgtttcagatcgcgcgaggcgcgccaacccgtaccagaccaacccggctcaccaaaaatattgctattcaaagcatcatggatcaaaaatgccaactgagtactgataacatgaggagcatattcttgcgcaccttcacggccatcaatgaccggtgctctttctaattcaggtaacggcaatatctcttgctggccaacatgagattgagcaacattctctatcgagttttcagaaagttcgattgaacgtaccgtatccccataaattactggaatatcgcactgcggacatgcaattttcggtttagcctcaaagagaacatcgccatcttcgttttcaatcttagtaatgaagtaaggatcgatcagatagccaccattggacatgaccgaataccctcgtaccatttgcattggagtgaatgatggtgatcccaaagccagagattcggtacgtacaatattttgtgccggaaaaccaaaccgttgcaggtaatcagcggcataatcgactcccattgctcgcattgctcgcaccatcacgacgttcttcgattgccctaatccctgacgcaaacggattggcccaacataagccggtggtgagtttttcggacgccagtcagtactagctcctgcatcccaacgactaatgggtaagtcattcaacaatgaagctaatgtcagccctttatccatcgctgcggtatagagaaatggtttaatattagaaccaatttgacgtaatgactgagtgacacggttaaatttactcaagttgaaatcaaacccaccaaccagcgctttcacagcaccatcattcggatcaatagagaccaaagcagcattagcttccggcacttgtgccaaccaccaaatatcctttactttccgaacccaaacctgttcacccacttgaaccacttcattcacactacgaggaaccgcaccctgtgcactatcagatttgaactttttggcccaacggacacccgcgatgggcaattctacactgctgccatcaggcaacatcactatcgcctgatcagtacctgctttggtcactacagccggcattaacgccccataacttggtaaggtcttaagcttcttgacaatttgttcccgatcccaagcaggttcacccactttccacaaaacttcctgcgccccacggtagccatgacgcacatcataatcaatgaggttattacgaaccgcatccacggcagctaactgaagtttacgggtaatcgtggtataaaccttataaccgtcggtgtaagcattctcaccataacgctcaatcatctcctgacgcaccatctcggacaaatagggcgcagagaaagcaatctgaggtgcatgataattcgctaccagtttttcacttctagcttgattatattgctgctgagtaatatagccctcattgagcatacggctcagaaccacattccggcggttaatcgctcggccataagaataaagcgggttaaacgtagaaggtgcctttggcaaaccagcaatcatggcgatttcactcagtgtcaactcattgacactcttaccaaaataaacttgagccgcagctccaacaccataagcccggtaaccaaggtaaattttattgagatagagttcgaggatctcatctttattcagcaattgctcaatcctgatggccagaaaagcttccttgactttacgcatcaacgtcttctcaggagtgagaaagaaatttctcgccagttgctgagtaatggtacttgccccttgtgatgcatgacctgaactcatcgcgacagaagctgcccggataatccctacagggtcaaccccgtgatgttcataaaaacggctgtcctccgttgcaatgaacgccttcaccataatgggtggaatttcgggcagctcaagaggcatacggcgcttttcaccatattgagcaatcagctcgccatctgcactgaacacctgcattggtgtctgtaatcgaacatcctttaatgtcgccacatcaggtaactgaggctcgatatatttatacataccaaaaatcgaggccgttcccagaaaaatgcaactcacaacaaagactagaaaatactttacgaacttcacctgaaatttcccatgccatgttagtcgggtggtttataaacaatcggcgcgtagtataaaggttacacagcaccttgaatatggtcttttattaaaattactgatatggagatcgatatatgtattcaccaaaatggtatgtcggattggacatccaaaatggcatccttcgcgccgtcgcagctataaaacgccgagatggctggcagcttcgccactgctggcaatatcttttatctgatgcggtcatgccagagggccgtttacaacggccagaaatattatgtgatattttaaatcaatggcgccaagaattacctaaaaaaatcagtttcaggctcgccctacctgtacaacaaacattgcagaagagtctgattttacctccagatatcaatcttaaagagccggaacaaggctggtttatcaacgccagtgccgagaaacaattcccctttaatacccgagaactggcgctggattaccgtattattgaacaaaacgcctacatcagtgccgctcgccagaaagatctcaacctctggctacaatgtcttgcacaagcaggaatatttccagacgccattgatattgccccttgtgccctacgctatatagcacaatatgccggcgttcccgctgatagttggctgttacataggcaacaatctggttggctatgggtatctcctgccaatgcccccttcgcttatgatttagtatcagcaaatacggctgtttctccacagcagattatccgtcaattatctgcttcatctatggctgaacagccggtttactacagcagctaccaacaagaagctctacctgaaggaacttattcttgggatatgttgacagcatttcgtcactatcaaccaccactgccaatccaactgatggaatatgtgatagccggtggtttagcactcagaccggatgataagtaatgatgtatcaggttaattttctaccttggcgccaaacccggctaagacatcgttatcgttggtgggcgattcttctcttattgcaattgatgttgtggctgacagtactcgtctggatgttattaaaacagcaggaaacgattaaccagtatcaaagacaatggcagcaactcaaccagcaacaattatatttgcaacaacagataactcagacagaggaggcggtcaatcttcacaacaaactggccgataaattaaaacaacaacaaacgtggctgaaacagaaccaacaacattggcaattatttaatgaattacctgaattattaccagaaggaagttggttaaccgctttcgatgatcaggcaggccaattaaaactggttgctaatagtctggattattccagtatgacgtctctgctggataatcttgaaaacaacgggcaattgtctgaaattcaactaaaaaagatgaccactaccgaacaacaaatcaggcaatttattattgacgctaactggcagacggagatatccgatgataaaaagtgactatctatggtggtttgccaaaccaacctggctgctctttatctggcagcaagctatcatcatgctatttctgattctgttttatcttttcttctggcaagaaagaactgaacaacgaagtagcctggcgcaaaaaatagcagcccaacaaatcaataccaaagcagccaatgaacggctaaatcagctaccgctattgggaggtatacgacaacacatcaaccaaatagaaaataaactcagtaagccgcgacaaaatgaggtaaaaattaccgcaataaaacaattacaacagccattgataaactctggtgcgcaagttcttgagtggcaacgtaaaaaagaaggggaaaaaacgctctggcaaatcacaatttatttgaactacgaacagatgctgagttttcttgaggcgttacaaacgttatatccaccgctgctaattaaacagctttccatttcaccatcaggtgaatctctaaacgtcaaaatcaccctgtcagaagcctcacatgaggaattttatgactaaaaaatttattctattcatcctttttctgcccgctattgttgttgcagaaataagaaatccttttgttcccccgatgatagagacagaagagcaatcggttgagttatttgatcaatcagtcaatgagaccgaaattcagtccctttcaaccgtattacaatatgcagatgcagaaagaatcgccatgaatctcaggcaaaatacgcccgcactgataacaaaagagggtaaagttgattttgatcctgaaactaacagtctgattttacaggatacccccatcgccatcgcacagataaaaagctggctgaaagagatagatacaccacagcaacaagtgcagattactgcacatatcgtgaccagtagccgagaagcattacatgaactcggcatttactggggtatgccgataggagagcagattaatacatcaacgggtataaaccgcctcaatatcaaccaagcagccaacgataacatgcatcgatttgcattcaatattgcccgcattcacaccagtttgctggaaatggagctcagtgccttagaacaagaaaaccaactagatattatcgctagcccaagactaaccgcctcacatcaacagttagccagcatcaagcaaggctctgatattccctacgtcagccaagaaaaagagaaaagtaccgtgcaatttaaagaagccgtactaggaatggaagtcacaccccatatactgagaaaaaacaaaatcagactctctctaaaaatcagtcaaaacatgccagggatctcaataagtcaaggaggaggtgaaaatttaaccatcgacaaacaggaaataataactcaagttactgtaaaaaatggtgaaacacttattctcggtggcatttttcaacagaaaaaaggcgagcaaacccaaaaggtcccttatctatcagacatcccactactcggctcattatttaaccaaaaagctcataaacacagccgacgtgagttagtcatatttatcacacctcaattgatggacatttgatcaaaaataaaaatataaccgttatatcagtgagttggatataaaaaacttaactattccgtatgatgatgcgcagatttttccaactaatcctgtttatagatttgacgctgagtccaatttagcatacaagagttaactaattgagtggtcgggtttaacatcacaataatcagccaatgaaaccagagcttccgtcacaaaaagctcgtcgttgatttatatagttgcaaaactggctgatgtactgagataattttgttatctgatctcacattaccgctcatgaggtttcagtttaggtcccgctgctgatttgattagcggggcgggttatcattaacgaatagtcttagtaataccaaaaacatggcagagaaacgtaatatctttctggttgggcctatgggtgccggcaaaagcactattggtcgtcagttagctcagcaactcaatatggagttttacgactccgatcaagaaattgagcgacgtaccggagctgacgtgggctgggtattcgatgtggaaggcgaagaaggcttccgcgaacgcgaagaaaaagtgattaacgaactcacggaaaaacaaggcattgtactggcgactggcggaggttctgtgaaatccagagaaacccgcaatcgtctgtcagcccgtggggtcgtggtctacttggaaaccaccattgaaaaacagttagcacgcactcagcgcgataaaaaacgtcccttacttcaagttgatgcaccagcacgtgaagttttagaaaatttagcaaacgaacgtaatcctctgtatgaggaaattgctgatgtcactatccgtaccgatgaacagagcgctaaagttgtcgctaaccaaatcattgagttactggaaaaaaactgattcaagcaagtctgtacagcgataaataattaaggcgaaggctgcttatggaaaagatcactgtcactttaggggaacgtagttacccaattaccattgcaaaagggctatttgacgatccttctgcttttgcaccattaaaagcaggccagcaagttatgctggtgacgaatcaaaccctagctccgctgtatctggcaaaagtaaaagctactttgcaacaagccaggattcgggtagatgaagtgattctacctgatggtgaacagtacaaatctctttctgtattaaatgacgtattttctgctttgctggaaaatagccacagccgggacacaacacttatcgctctcggtggcggcgtaatcggtgatttaactggttttgccgctgcctgttatcaacgtggtgtccgttttattcaaatgcctaccacccttcttgcccaagttgattcctctgtcggaggaaaaaccgcagtaaaccatccctttggcaagaatatgataggtgcattctatcaaccagcctctgtgatggtcgatctcaactgcctgcaaacgcttccagcccgcgaactctcttccggtctggcagaggtcatcaagtacggtatcattcttgacagcgcattttttagctggcttgaagataatatggataaactcctggctcttgacaaccaagcaatggctcactgcatccgtcgttgctgcgaattgaaagctgaagttgtcgccgcagatgagaaagaattgagtggcttgcgtgccctgctgaatcttggtcacaccttcggtcacgccatcgaaacagaaatgggatatggtgtctggttacatggggaagcagtttccgccggaatggtcatggcagcaagaacagctcaacttattgataatttctctgaacaggatactcaacgtattatccgattgttggagcgagcaaatctgccggtacacgggccacaaaacatgccaccagaagcctacctcccacatatgatgcgagataagaaagttatagcaggtaaattacgactggttcttccaacaaaaataggtaaagctgatcttcgctcagatattgaacacaactgtgttgttgacgctatccttcagtgtttaccgtatgaaaatgtgtaaattttaagtaagttgtatgcttattgtatcatatcctatggatttcaagatggatcgcgacggcaagggagcgaatccccgggagcatagagaactatgtgactggggtgagtgagcgcagccaacaaagaggcaacttgaaagataacgggtataaatgtttttttgcatacatctggttgttgtgtcataaaataacgactctatcagacaaatttctatcttcgttaagtcagcctgccggactgacttcaattgcaattggcagtacttggctctgtttggagggcatatggacgaattcaaatcagaaaatgaacaaagagcaaataacgagtttaggccagatacctcagatcgccgtccttcacgctcgcgtcagccattaaacaaacccaaatttgcagtttcacgtcagcaaatgatgctcggcattgggattttagtgctgctactgctgattattgctatcagttctgccttaaaagccccaactgaacatgaaaaacagcaatcgccaaatgttgctgagaagaatattgatttatcaaattcatcatccaacaacgatgataatcaatccataacatcagagaataccaccacagatacaatcaacagaccacaggaaatccatgttcctcctgtcagtggtacttcaactcaacctcatcagcttcaaactaacaatggcaaaacccaaaatcagcgcattgaattaccaggaaatattcctgatgcactgactcaacaacagagtaatataaatcacgcagtacagaatctgaatcaagcccaacaatcacagccagtaacaccaccaccggtggtacagcagaaatcagaaaatatccgtccactgaaatcagaaacaccggctaaatcaaaaccatcgacaagtcatgctagcagtaaaaacaatgtggtcagtagcaccagtagtgatcaattaaaaaccccggcaaaccactacactttgcaattaagtagtgccagccgctcagatacactgaccgcttttgctaaaaagcataatcttacccattacaaagtttatgaaactaaacgtaatgaaaaagtttggtttgttttaattcatggtgattacccttccgtttctgaagccaaacgggctgtttcatctctaccggccgagattcaggcgaaaaaaccttgggttagaacgatgcagcaagtgcaacaagatctaagaaaataaaacaatatttattaggcgctgatatgctgtcctaaacagagtacaatctgcggctctggaatgattgagtaattaattgacagcatgaaaaaaaaacgcgctttcttaaaatgggccggtggaaaatacccgttggtagatgatatcaaacgtcatctgccagccggtagtcgtctgatagagccatttgttggcgcaggttctgtctttttgaacacagactacgattcttatatcctcgctgatatcaacagtgacctgattaacctgtacaacacagtaaagctcagggctgatgagtttatagtccacacacgccctctgtttacccaagaatacaatacagccgaacatttttatcagttacgggagcaatttaaccaaagcactgacccgttccatcgcagcgtattattcctttatctcaatcgccattgttacaacggcctctgtcgttataattctcatggtaaatttaacgtaccttttggccgttataaaaaaccctactttcctgaagaagaattacactggtttgctgaaaaagcccaaaatgcgacttttatctgcgagcactaccaacacacgttgaacgaagcacataaagactcagttatctattgtgatcccccctatgctcctttgtcagcaacagcaaactttacggcgtatcacaccaatagttttaacattgcagatcaggaaaatctggcaaatattgcatttaagttatcatcagaacgtgcaattcctgttttgatatccaaccacgatacgccaatgacgcgaaaatggtactatcaggcttcacttcatattgtcaaagcacgtcgtactatcagcaggaatatccttgctcgcagtaaggtagacgaacttttggcattatatcgctgatttatccactccccttttgcttggcaattaagggatgatagaaacgatttggagaagataatgaaagactttctgattgccccatccattttatctgcaaattttgcgcggctgggtgaagatacagataaggtgctggcagcaggggctgacgttgttcactttgatgtgatggacaaccattatgtccctaacctgactatcgggccgatggtctgccaggctctaagagattatggtatcactgcaccaatcgatgttcatttgatggtaaaaccggttgaccgcattatccctgattttgccaaagcaggagcaacttacattaccttccacccagaaaccagtgagcatattgaccgcagtttacaactcatcaaagagcatggttgtaaagctggcttggtattcaatcctgcaacgcctctgagtcatctcgattatgtcctggataaactggatatcattctattgatgtcggtaaatcccggtttcggtggccaatctttcatccctggaacactagagaaactgcgtcaggttcgcaaaattattgatgaaagcggttatgatattcgtcttgaagtagacggtggcattaaagctagtaatattgccgcagcagcaaccgcaggagcagatatgtttgttgctggctcagctattttcagccagcctgattacaaaactgttattgataatatgcgtagtgaattgtcaaaggtatctcatggcaagtaaggtattaaaaggtattcgtgctatcgcttttgatctggacggcacactggtagacagcgccggtggtttggctgatgcactggatcaagcgctgttagccaaaggtctccctgctgcgggaaaagaacgagttgcagcttgggtcggtaatggcgcagacattatggtcgaacgtgcgttgacatgggctagaaccaaattgactgcgcaactgcataaagaaacccgtgagctgttcgaccgtttctatgaaacaaccgtaacaacaggcagccaactgttcccggaagtcaaagttacattggctgaactggcaaaacacaacttgccaatgggtatcatcaccaataaaccaacacctttcattgctcctctgttagcttctttagacatcagtgaatatttttcattagtgttaggtggtgatgatgttaaagagaaaaagccacatccggcacctatttatttaacaatgggcacattcggactgcgtaaggaagaactgctctttgtcggtgattcccgtaatgatattttagcagcacaagcggctggttgcccttgtgttggtttaacttatggatataactacggtgaatctattgcattaagcaatccagattgcatattaacgaatttttcggatctactatccacaattggcctcccatctttaaaacttcaggaagcataataaaatgaatgaacccactgtatctgaaacactaaactcccaaaaacctattgtattcagcggcgcacaaccttccggtgaattaaccatcggtaactacatgggggcgttacgtcagtgggttaaaatgcaggatgattatgactgcatctattgcattgttgaccaacatgcaattacagtgcgccaggacccaaaagagttgagaaaacgcactctggatacactggcgctctacctggcttgtggcattgacccagagaaaagtaccatttttgtccaatctcatgtcccacaacacgctcagttaagctggattctaaactgttatacctatttcggtgaactcagccgcatgactcagtttaaagacaaatcagctcgtcatgccgaaaacatcaatgcaggcttgtttgactatccggtactgatgacggcggatattttggtataccaaacaaatcaggttcctgtaggcatcgatcagaaacaacaccttgaattgagccgtgatattgctcaacgatttaatgccatctacggcaatatctttgctgtaccagagccgtttatcccaaccggtggtgcccgtgttatggctcttcaagacccagaaaagaaaatgtccaagtcagatgataaccgcaacaacgttatcgctctgttggaagatccaaaatcagcggctaaaaagataaaacgcgcggtcacagattcagaagaacctcctcgtgttcgctacgatctggaacaaaagccgggggtttccaacttattagatctcctcgcgggtgttactggcaaaaccattcccgaactggaagcagaatttgaaggccagatgtatggtcatctaaaaagtgctgttgctgatgccgtttccggtatgttgactgagctacaagagcgtttccactatttccgtaatgatgaaatcctgctgaacaaaatcatggcagaaggtgcagcgaaggcaaaagcccgtgcccaaattacgctagataaagtgtatgaagctgttggctttattgctcacccttaattaaaagataaaatgtgcacgtttactacgtgcacatttcagactacagaaaaatccatttaaaaaacgaggcgtatttttacatcatcgatgataaaaagcctggtagcttaatcagacagaaaagcaatacgattgggcagattaaaaccgtgtaaagcaagcttaagctgacctatttaaggtattcatatttttcatattcgattatttaactggtttattaaaaaatttattctgcggttgaaaatattattaaagcggtttattttccattaatagttttatgatgggcagattttaaaccatgattaaaggccgttgttttaccttctagttttaatcggtataaggttttgaccgttgtttttaccacttttaacacctgctttttatgaggtttaatcggaagttttttggcatcctgatacaaatgtactatgacgaccacaacccaccccgctttcacgcctactacgatgaacatatagaaaacatcctaaaataagcctgtttcttgtacagaccgatatctgattcacaaaaataagtcattaaaaatcagtcaactataaaaaaatcattttttttctcatattaactgtaagaaattaatgtgtggtgcgactaatcgagtgaagcaaatgcttgtttcagcaaagcagtaattcaccttctacacaaatataaaaggaatgttctatgactaagcaaacgacaaaagcattactggccctggctttaggcagcgtatttattacggcaagcacttcagcaatggcggattccggcagcaaaatggagaaatgctatggcgtttctctgaaagggaaaaacgactgtaaagcaggtgcaggcaccacctgtgctggtacctcaaaaaaggattatcagggtaatgcctggaaaatggtaccggcgggttcctgcgtaaaaatgaagtctccgacctccccgactggttttggtcaactggacgcatttaaagaagtgtaattccgacattaaacaggagctcatacgatgacagtttctttgccctcacatagcgtctctcgtgatgctcctgaccgcctcatgctaaataggcttccagccagagcagggatcgggttaaagccggagcattttcgcgctattctgcacaataaacccgacattggtttttttgaaattcacgcggaaaattatctggttgcgggtggtccatttcatcaggcactgaccaccattcgccaagattatccgctctctattcatggtgtgggcctgtccatcggaggagaaaatcctctgaatcagacccatttacagcgggttgctgcgctggttgaacgctaccagccggccgttttttctgaacaccttgcctggtcgactcacaacgatctatttctcaatgatctgctgccactgccttataccgacgtcacgctgacgcgggtctgcgaacacatcgatcaagtacagaatgcgctgcgtcgtcccattctgctggaaaacccatccacctacattgagttcagtgcctcaaccatgagcgagactgactttatctccgaggtggtacgccgcaccggatgtgggctactgctggacgtgaacaatctctacatcagtggcgtcaaccataatcgctgcccaaggcagatgttattagagctgccacttcaccgtgtcggtgaaattcatctggcaggttatacggaaagccgcgatggggcaaacgacctgctgctgattgattcacacgacagtcatgtgaccggacctgtctgggatctctataacaaaaccctgcggaaaacagggccgatcgccaccctgatcgaatgggacagcaatattccaccattagacgtgctgctgaacgaagccagccatgcccagcattacattacggagagcaagaaacatgcaacaacaactgtatcaagcacttcttgatcccgacctcatggtaccagaggggctgacaacctggaacggtagcgatccggcggtacgttttgcggtttatcgtaataatgtcatagcatcgctaatcgatgcactggccgaaaactgccccgtccttctcgctcagctcggagagtgcttttttcgtgcgatggcagcggagtttatacgtcaacaaccgcctccctctcctgttttggcaggctatggcgcacaattgccggactggattgcgacatttcagccgttggcagactggccttggctgagcgatctcacccggctggaaatgttgtttatcgaatcactgcacgcggcggaccctgccgaacagacggcagaagcggcccccattgacgatcccgcacagttgctgatggcgctccatccttcggtacggctcttcagttcagattatgccgtcttcagcctgtgggcctcacaccaacaaagtgaaaacgagatgatgctggacccattccagccggaacatatgctactgtgccgcgttgacgacgacgtacgaataatgttgctcagccgtgcggaaatgcagtttgttaccatgctccagtctggtcgatgtcttaccgaagccttagagatcgccgccggagaggatgcaacttttgaacctcagtcggttttacaacgcatgcaacactatggactgatcctttctctatatagcaacacggagcgctaagatggcattactcaaaacattagggtcaaaagggcaacatattgcgcaggaaaatgttcttccccttctggcacgcattagccttgccgcaacattttggctatcgggccaaagcaaagtggttggattaaacatagatattctggagacacgcacaccctggcaactagggattccgcgcgttaccgacagctccgtgtcgctctttaccaacgagtacaagcttcctctgctaccacctgatgttgctgctgtcatggccgcgaccgcagaacacttgtttccgctgctgctgattgtcggattagcaacacgcttctccgcgctagcattaatggtgatgacgctggtgattcagatatttgtttatccagatgcctggcctgtccatgctacctggctgacggctcagttgtatctgatgacttatggcggtgggaggttttcgcttgatcgcctgatttaccgccatcgtacctgattccccttccctacgttactttattttgattctcgttttcgccacgagcgaatgcggaagtcatagtgcgcaggtcggcaagctgttgtctgaagtttcggcacccgtcgcatattttcaaatgcagcattagctgaacatgttgagaaagcacgattttttcatccagcgcctgagacatcaggcgtgtagcttggtaacaactaagcatatttatcctcatgggaaaaccagcgttgtgacaaacattcacgtaaacgcatacgcgcacgccagagcatcacattcagattgctgacagagagcgccatctcctgacagatctcctgagtctcaagaccaataaattcgcgcatcataaatgcccgcgcgttttgcgttggcaactgtgtcagacaaagctcgaaaatcgtccaaaattgctcctgctcggccacttcatccggtaaatgccagcactgcggatgctcgtttcgcggccaatgaccagactcatcaaacagcgcttcgaaattttgctcatcaacatcatcagtcagttgcacgctgctgtgccgataacgcatacgcaaggcgtccgagattttgttgcgcaggatcgtaaacacccagcttttccaggcggctcgtccggcaaaagaagaggcattcttcatcgccccttccagcgcctcttgaacaacatcttccgcctgatgaaaatcattcaactgcaagatggcaaactgcaacatctgtttatgcagcatggaaaaaaactgcggatcccgcagcagattattgatatcggacattgtggcttctatcttaacaggattattcgggataaccggatattacgaaacaccattttggcggaatcgcttaaattcactcacatgacttagggaccgtttgggaaacggggacaattctaaattaaatctgttttttgtacagcaggggaagtgtctttccccagagcagcttatttttcgttcacctccatcagatcatggaggaaagtatcagtagttcagtaactgctagctagcgaactaagtttaaccgtctgttggatcgcacggaggctggaaacattcttgtcgttgcccaactaatagattaagacgaaatgcaatggatatcagaaaaacagtgtcagcgctaatgtgcacgttcaccacgtgcacattttattatttcccgaacaacctacggttaaaatcctcaatctttccaaacatcacccgcttttgcatagtcaggctccaactggcagataacccagcggcactcatcaaccgacgatattgctcttcgtcaaatggcatattaaaagcaattgctatcgcttccctaacgaaaacatcactattacgggaaacaagaacaagaggttcatctgggctgacatttcccgctgcaataattctataaagccagccacaacggccactctcctgcataatggcagaaaaattgctgataccagaatgacaattaagtttgtaacaaggcgaacgaggctgagttacttgaatcattgcctctccccaactgaaaatatcaccaatacaaatattttcttcagtcaacccagttgtggaaatattttcaccaaacgctggagcaataaaaaaatcttcttgatcaggaaattgatgtttccagaaatcatagtgttcacgaggataatgacaaagtgcacgatcagggccgccgtggaaatgggtttcggcctgctcatcaccgtctaatcctagagaagtcagacgcaggccaccatcaaccatccgtttgttaattgcgctggcagaaagttttcctgatatttcaattttacccgtatatacctgcggacaatacataattcactttccttattgaaatcagtctgacatcaccatcataaaccaacattcaaccaataaaaatgccggcagtcatatcagccggcatagcagaaaagagaaattattcagcaagttatttcactttttcctgataacgcttcgctgcttcatcccagttaacaacgctccagaacgctttaatatagtcaggacgacggttttggtactgtaagtaataagcgtgttcccaaacatccagaccagtaatcggataaccagatgcaccagaaatcgcttcacccattaatgggctatcctggttagcagtcgatacaactgccagtttgccatcatctttcagtactagccacgcccagccagaaccaaaacgggtagccgctgcctgctcaaatttctctttaaaagaatctatgctaccgaaatcgcgctcaatagcttcttttaatgggccttgcagagttgtgcctaatttcagacctttccaaaacaagctatggttagcgtgcccaccagcattattacgaacaaaagtacgtttatcagcaggtatcttatctaattgctgaatcagatcatcaatacccagtcctgccagctcagggaaggcttctagggcgctattggtattattaacgtaagtctgatgatgcttggtatggtggatttccatcgtctgcttatcaaaatgaggttccagagcttcataagaataaggaagagaaggtaatgaatagctcatatcatgtactccagtcatataagaatggttcaaagtccacaccttgtgaacaacgtgatcattatagttaattaaatattattggaaatgcttatcaataccatattcttattatggttttatcatacaactgtgtttcagtaacttatcagtcaatttgtctatattaaacattattattggattaggattttgaattactatttttgattagcaattaaacctaaataaacctgcaacactaaatgacaatcacgtgaaaaatattctttttattgcgtgatcttccgcgcaaaaaaaaaacaaaaattctctttacactttagttaactttgatttgacataatattaacattcgtaaggagaatattacatgaccaaaataatgaagcaccctattcctatcgccattgcagaacatgccctgatgaatgagcaacaatatcagcaagactaccaattatcgttgcaagatcccgacaggttctggggtgaaaaaggaaaaattgttgactggattaagccttacaccaaggtaaagaatacctcttttgatcctggacatatcaatatccgctggtttgaagatggaacactaaacttaagcgcaaattgtctcgatcgtcatctaaaagaacgtggtgagcaaaccgctattatctgggaaggtgatgatccaacagaatccaaagcaataacctatcgtgaactacaccatgatgtatgtcagtttgccaatgtattgaaaaatatgggtattaaaaaaggcgatgttgttgctatttacatgccgatggtgccagaagcagcggttgccatgttagcatgtgcccgcattggtgctattcactctgttattttcgcaggtttttctcctgatgctgtatccgggcgtatcatcgattcaaacaccaaattggtcattaccgccgatgaaggattaagagccggacgtacaatccccctgaaaaagaatgttgatgacgcattaaataatgcagccgttgtcaatgtatccaatgtaatcgtttttaaacgtactggaaatattggtcactggcaatctggccgtgacctttggtggcatgaattggtcgcagacgcgagtgctgactgtccagttgaagagataaatgcagaagacccgctgtttattctctatacctcaggctctaccggtaaacccaaaggggtactgcacaccactggaggttaccttgtatatgcatctctaacatttaaatacgtattcgattatcagccgggggaagtctattggtgcacagccgatgtgggatgggttaccggacatagctacctgctctacggccccctttcctgtggtgctattaccctaatgtttgaaggcgtaccaaactatcctgcggttaaccgcctaagtcagattattgataaacatcaggtaaatatcctatatacagcacccacagcgattcgtgccctaatggcggaaggtgataaagctattgaaggaacaaaacgtacttccctgcgtattatgggatcagttggcgaaccgattaatccggaagcttgggaatggtattaccagaaaattggtaacagcaaatgcccgattgtcgatacctggtggcaaacagaaactggtggcttcatgatcacaccactaccaggcgcaaccgaactaaaagcaggttccgcaacgctacctttcttcggtgttcagcccgcattggttgataatcttggtgaacaactagaaggtgtttgtgaaggaaacctagttattaccgattcctggccaggacaagcacgctcactatttggcgatcatgaccgtttcgaacaaacctatttctctacctttaagggaatgtattttagtggtgatggcgcacgccgtgatgaagatggctactattggataactggtcgtgttgatgatgtgctgaatatttccggccaccgtctaggtactgctgaaattgaatcagctttggtctcccatcctaaaattgcagaagctgctgtcgtaggtaccccacataatattaaagggcaggcaatttatgcctatgtcaccttaaatcacggtgaagaaccctctccagaactctatacagaagtccgtaattgggtacgtaaagaaatcggcccgattgctacaccagatatcctacactggacagactccttaccaaaaacccgttcaggaaaaattatgcgtcgtatcctgcgcaaaatagcctccggcgataccaacaatctaggggacatttcaacactagcagatccaggagtagtagaaaaattgttagaagaaaaacaaacaatgagtatttcgtgacaaatcatgccgccgtaaggcggctgtaatcaaaatataataaatataatgaggatatactccgatgaatgatgacatttaccaagggatcgagaataacccgcgtttcaaagaattggttgaaaagcgaggacgttttgcatggttgctatcaataatcacattaattctgtatgtcagttttatttttctcattgcatttgcacctgaatggctaggcactcccctttataatggttccaatattacccgcggaataccggttggtattggtttaattgttatttcattcatcttaaccggcctatatgtcatcagagccaatagcgagtttgatcaccttacctcacaaattctcagtgaggtaacgaaatgaaaaatttcctgttattagcaataatgttatttcctcatcttacttgggctaacgtaatctctgaaactggagaaaggcaacctgtcaacattcaggctattatcatgtttgtcctgtttgttggtttcacactctatatcacttactgggcctcaaaaaaaacacgctcccggactgattactacacggcggggggacgtattacgggtttccaaaatggaatggcaattgcgggagattttatgtccgcagcatcattcctcggcatttccgctttagtctatacgtctggttatgatggactaatttattctatcggcttcttgattggctggcctattatcctatttctgattgctgaaagattaagaaaccttgggcgctatacttttgccgatgtcgcgtcttatcggttacagcaacgcccaatccgtatattatctgcaattggctcgctgtttgttgtcgccctttatcttattgctcagatggttggtgcaggtaaacttatcgaattgctttttgggcttaattaccatgtagcggtcgtattggttggtatcctaatggtactttatgttctgtttggcggtatgctagcaacgacttgggtacaaattatcaaagctatcctattactagctggtgccacctttatggcccttatggtcatgaaaatagtaaacttcaatttcaatacgttgttcaaagaagccattgcagtccactcaagaggtgaagccatcatgagtccaggagggttggtatctgacccaatatccgcactttctcttggtctggcattgatgtttggtactgctggtttacctcatattatcatgcgtttctttactgtaagtgatgcgaaagaagcccgaaagagcgttttctacgctactggctttattggttatttttacattctgacttttatcatcggcttcggtgctattttactggttagtccaaacccttcctttaaagatactaccggcgcactcattggtggtactaacatggcagccgttcacctcgctagcgcagttggaggcaacctgtttctgggttttatctctgctgtcgcctttgccacaattctagccgttgttgcggggctaacgctggctggcgcatcagcagtatcacatgacctatatgcaaacgccattaaaagcggtaaagccaatgaacgagatgaactgagagtttcaaaaataacagttgtgatacttgggtttatcgcaatcggattaggtattctatttgagaaccagaatatagctttcatggttggattagcattttctattgctgcaagctgtaacttcccaatcattcttttgtctatgtactggcataaactcactacccgtggtgcgttagtcggaggttggctaggattaattacagctgtcgttttaatgattctcggtccaacaatttgggtcagcattctcggtcacgagaaaccaatctatccttatgaatatccagcattattctcaatgattatcgcttttattggttcatggctattttctatcaccgataattcacaacaaggtatgcaggaaagagaacaatttagaatccaatttattcgatcacaaacaggacttggtatcgcacaaggaaaaacacattaattacgtttgtatggccaacctctccttcgggagaggtattttcattaaaagccatctgaattcagagctatttcacaaattaacctcttgttttaatcccaggttaatgattaactcttttatttcaatttatacccgttatccttcaagttgcctctttgttggctgcgctcactcaccccggtcacatagttatctatgctcttggggattcgctcccttgccgtcgcgatccatcttgaaatccattgggtatattaattaagttattaatctgtatgcgaaataaatggccgattattatttttttgactctctctttactaccgataatcttcattagtgatttaaaaggtgagtataagttaaaaataatattactgagtttcttactagcaaatgttaacgcatttttttattgttataaatatcttaagccattggttttacttatttctatattgtggtcgcttaatatatccacatcattttttttctttaatgaacatcagataaatttttcttcaactattgccaacacttttatcaatacaaatagcaatgaagctgtaggtatgttgtcctacaataaatactatgtatttttctttattttcatgctgttaatatattttttgtctattagatggctctcaaataatatagacaaaagattactaaaattcagtttatgggtttttatttttttctgcctattagggcctattgactactatatctcagaaaaaaatattcagatgatattattttatcagaacactttttaatgggaacaccattctataactcatcagcaatggtaaaagcaatatatgataatcaacaaattaaaaatatttcttctgttaaagtgaattttaattatataaaagaagataaagatattgatatctacatattactgataggagaatcagcaagaagagatcatatgtctctgtacggttatgagaaaaccacaacaccaacattagacacgatgcagaaaaatatgctgatattcaatcaagctatttctccagctccagttactatattatccgtacctatttcactttctaatattactttataccagctcagaaataaggctcattatgctgacaatgttatatctttagctaaagatgcagggtttaagacaacttggataagtaaccaaggaagatcaggtaaaaacaatagtctgatcacaattattgctaatatggctgaaagccaaaaatggaatgaatatattggatatgatgaagagttactaacctatttagatgattcattaaaacagaaaggtaagaaatttattattatgcatatctatggcagtcatgagccatcctgtaaccgatttcccgaaaataaactaatatctttttcatcgaacgaagatgataattgctatgacagctcaatagtttatacagatcagctaatagagaaagttattaataaaatcaaagattataaagcatctattctctatttttcagatcatggattacaacgtttagataaaaatggtgacatccgttatcaccacggagttagtcatcctcgaaaagaggcttataatgtccccttatttatctggtataacgataatgttaatccaagatatcatcatactggtgtaataaatacccctttctcaacttcagataattattaccttatcagtgattggctaggtatttatcataaatctccagaatactgccgttcaccattaagcaattgtttcaaatcagagaaagatctaatggtgatcgatggtaataaaaacttaataaaatataatgatcttcttggtgaaaaatatatcaaaaattcaaacaagtgattcccagatgtttaagtctattatccttggcatcaactcaaataaatgattcatatacatgaaagaaggataaccacaatctgtaatttctcaaatttttaatacaataataagccataatgatgaattaaatttggaatttcactactgactttatataagcttaaaaaataggtttgagttatttttcgtatcagctacttatagcgggttttaattattaacggatagataagagctggctaattttcttaaaagaacctgattatcacttaaattcagctcccataggcgtatacttaaaataagtctgtgtggaggtaaatgaaaatggctaaaaatcagattcaattccaaaaaggcatttctattcatgaggttatttcattatatggtcatgaagaacaatgccagaaacaggtgttcgatatgcgctggcctacggggtatcactgccctcattgtgggcatgataagtattgccagttaaaatctcgtctcctttatcagtgcaatcaatgccatcatcagacatctttgacggccggcacattgttttctgcgtcaaaattacctttaactgtgtggtttttggcgatttatctcatgactcaggagaaaaatgggatttctgcacttgaattgtcacgtcaactgggcatttcctacaacgcggcatggcgtatgaaacacaagctaatgaaagcaatgaaagaacgggatgacgaaaagcctctcggcgggtttattcagcttgacgacgcatactggggaggggctcagcatggccccgagggcgaggggcaaaagggaaatgccctttcgttgcggaggtttcaatgaatgaaaagggccaccctatgttcatgcgtttcagcgttgtgaaagggtttaagaccgaggaacttacccgttgggctaaagtgtatcttaaaccaaaatcccttgttatttcaaatggattagcttgctttcgggggattaagcaagccgggactttccatttgccccgcgtcaccggcggtggagcgcagagtgttaagcttccttattttcagtgggttaacacaatgataagtaatgtaaaaaattcgatacgcggaacatatcattcgattagcaaaaagtatttacctcgttatcttgccgaattctgtttcaagttcaattggcgctttaaccttaaaaaaacattcgaacagcttatttattcatgtatccgggcagcacctatacctgagtatttactcaagctagctgagattcgatggtaatcaggtaaaagaatgctcaccagatggaaatccaaaataactaaacagccttctgcatccatatgggctctaaaaatggttctcaccttcctaccccttgtatgcaaccgccttcaaactctacctctcaatgagccgtagccgtaacagaagcgattacacatgaagtgtgcctaaatgatttggcagtatcagacccctgaccagaaaacatgcctagatgaacgtaatgttccggtgaactcaccttgcgtggtcagataaccacaaaatgggatgttaacggaagggattctcaggccagggcaacagctcattcaaccgattgttcggccagacaggcagccggctgaggacatcacgtaaccagacccagggctcatgtccgttggctttggccgtttccagcaggctcattatcatggccgcccgttgccccgcggccagtgaacccgcaaaaagccagttctttcggccgagcgccacaccccggaccgcattctccgcccggttgttgtctatcggcaccccccgtcatccagataacacaccagcgccgaccagcgcttcagcgtgtaatctatcgctttgcgtaaccccgagttgggggccgtttgggtctgcatcgtttgcaaccaggaccggaactcattcagccacggccgggcataacgctgccgccactgacgccgtttatccggcggctggtgtttgatttttcgctccagcttgtacaggtcacgaatgccatccagcgcctgtttcgccaccggactttggctcgctttgtattggtcaaagaatttgcggcgggcgtgagcccagcaacccgcttcggtgatatccgcccgggcatgcagtgcgttgtaaccggcatagtcatccgtcaccaacgtgccgcccgaccagtctttcagcaggctctgggcataacggccgctgcggccgggatgcagctcatagtataccactgccggcgaggtatcggggccggtgacagacgtccacaggtaagctcgctgggtctggccttttcccggggccagtatcggcaacggggtctcatcggcatgcagcaccggggacgtcagcagcgtctgcttcagggcatcggctaacggttgcaacgccaccgccacctgccccacccagtccgacagggtgctgcgggccagggtgacaccgctgcgggcatagatttgctgctgacggtagagcggcaggtggtcacgatatttagcgaccaccacctgagccagcaaccccggctctggaaggcccttttcaataagatgggcgggctgggctttagcatgcacacactgacagcgcgcgcagctgtactgcgggctgatatagcgccggacgataaacgtggccggacggtattccagtcgctcactgatttcatcacgcaaaaagcgcagggcatgaccgcaatccgggcagctctccgtctccggcgccagccggatatcttcacggggtaaagtcgccggcaaaggctgacgtttaggctgggccggggtcgcgttttccttgatatgcaggcgtgacagccgggtttccagcaccgcgatatcggtatcggcatcttcctcaaactgactgcgtttgggaccggcaggcagggtttcgctgtgcgcgccaaaacgccagcgttgcgcctgtttcagggcctcttccagctggcgaatataatcaccttgttgctgaagcagcgccagtgcccgcaggcggaactggccggggtcatccagcgcgattaagtcattgagcgtcatgccgacagtgtaccggataattccccgtcgttatccggtaaaagtgtgaccggggtagcggaattagtttcgccagccggacaggtcatctccctcgacctgttgccagtgaatgccgcggatgagccagtcaaactgggcgggcgtcatcacccagctgcgctcgccctgcttcggccagacaaaatgggcccggtgcagacggcgggtacacagccagacgccgtgtcggtcccagcgcaacaccttgagacgggagcgggccttgttgcagaaaataaaagcggcttcgtcctgccagcgcaaattcagcccctccaggtgctgggtcagggcatcaatgccccggcgcatgtcgacgggctctcgcaccagaaagagctgttgcggtttcagcatcgggtcagtacccgcatcacgtcaggcaacagcgtcaatggacaggcgatggcatagccgtctggggtatgcagggtgacggtgcgcgcgtcgtcaggctggagtgaaaccggtaagagggcgggcagtgtctggctgagaggttgggggatgttgttactgtcggcaatccagtcgcggaaagcggaaaaactcagctgatgctgttcgcaatactgttttcgggtcaggtcactgtggcgccattgggtcacatggtgttgtttttgttccggggtatatcggctacggctcatggtgtcagtctccaggtgaagataaggaagcggtagcgtgcatgggccggagaggaagaacaaggtgagatgaccggacgtttacagatgaactatgcacgctatatctgtatctggctcataaatgcaaaaacccccagctttcgctgagggtttctacggtatttgaagcctagcagtgtcctactctcacatggggagaccccacactaccatcggcgctacggcgtttcactgctgagttcggcatggggtcaggtgggaccaccgcgctatcgccgccaggcatattcggttttcttccggccgttgtcgctcttctgccacaaccacccgaatcaatctctgaacaagctgaaaagtcatctctctgctgtcaaccggcttctgccggctgccctctgaacaccaaaacaccttcggtgttgtaaggttaagcctctcggttcattagtactggtcagctcaatgcatcgctgcacttacacacccagcctatccacgtcttcgtcttaaacgttccttccgtgacctcagtcaggggaagactcatctcaaggcaagtttcccgcttagatgctttcagcggttatctctcccgcacttagctaccgggctatgccattggcatgacaacccgtacaccagcggtgcgtccactccggtcctctcgtactaggagcagcccctttcaatcttcctgcgcccacggcagatagggaccgaactgtctcacgacgttctaaacccagctcgcgtaccactttaaatggcgaacagccatacccttgggacctacttcagccccaggatgtgatgagccgacatcgaggtgccaaacaccgccgtcgatatgaactcttgggcggtatcagcctgttatccccggagtaccttttatccgttgagcgatggcccttccattcagaaccaccggatcactaagacctactttcgtacctgctcgaaccgtcactctcgcagttaagctggcttatgcctttgcactaacctcacgatgtccgaccgtgattagccaaccttcgtactcctccgttaccctttgggaggagaccgccccagtcaaactacccgccagacactgtccccggcccggtttacgggcccaggtgagaacatcgaacattcaagggtggtatttcaaggatggctccacgcagactggcgtccgcacttctcagcctcccacctatcctacacatcaaggctccatgttcagtgtcaagctatagtaaaggttcacggggtctttccgtcttgccgcggggacactgcatcttcacagcgagttcaatttcactgagtctcgggtggagacagcctggccatcattacgccattcgtgcaggtcggaacttacccgacaaggaatttcgctaccttaggaccgttatagttacggccgccgtttactggggcttctgtcaagagcctcgccttgcggctaaccccatcaattaaccttccagcaccgggcaggcgtcacaccgtatacgtccacttacgtgtttgcacagtgctgtgtttttaataaacagttgcagccagctggtctctgcgactggcttcagctccggaggcaaaccccttcacctaccgccagcgtgccttctcccgaagttacggcaccattttgcctagttccttcacccgagttctctcaagcgcctgagtattctctacctgaccacctgtgtcggtttggggtacgattcaatatgacctgaggcttagaggcttttcctggaagccgggcatcaaccacttcaccgccgtaacggctcgtcatcacgcctcagtgttcacagaagagcggatttacctgctcctcccacctacacgcttaaaccgggacaaccgtcgcccggatggcctagccttctccgtccccccttcgcagtcacattcagtacaggaatattaacctgtttcccatcagctacgcctctcggcctcaccttaggggtcgactcaccctgccccgattaacgttggacaggaacccttggtcttccggcgagcgggtttttcacccgctttatcgttacttatgtcagcattcgcacttctgatacctccagcaggcctcacagcgccaccttctccggcttacagaacgctcccctacccaataacacttgcgtgtcactgccgcagcttcggtgcatggtttagccccgttacatcttccgcgcaggccgactcgaccagtgagctattacgctttctttcaatgatggctgcttctaagccaacatcctggctgtctgggccttcccacatcgtttcccacttaaccatgacttcgggaccttagctggcggtctgggttgtttccctcttcacgacggacgttagcacccgccgtgtgtctcccgtgataccattcttcggtattcgcagtttgcatcgggttggtaagccgggatggccccctagccgaaacagtgctctacccccgaagatgaattcacgaggcgctacctaaatagctttcggggagaaccagctatctcccggtttgattggcctttcacccccagccacaggtcatccgctaatttttcaacattagtcggttcggtcctccagttagtgttacccaaccttcaacctgcccatggctagctcaccgggtttcgggtctataccctgcaactctttcgcccagttaagactcggtttccctgcggctcccctatccggttaaccttgctacagaatataagtcgctgacccattatacaaaaggtacgcagtcaccctgattaatcacggctcccactgcttgtacgtacacggtttcaggttctctttcactcccctcgccggggttcttttcgcctttccctcacggtactggttcactatcggtcagtcaggagtatttagccttggaggatggtccccccaccttcagacaggatttctcgtgtcccgccttactcatcgaactcacagccataccatcttcgagtacggggctgtcaccctctctcgccggcctttccagaccgttcctctgatgctatcgctgatgcaggttctgggctcctccccgttcgctcgccgctactgggggaatctcggttgatttcttttcctcggggtactgagatgtttcagttcccccggttcgcctcattaacctatgaattcagttaatgatagtgcaacgcattgcactgggtttccccattcggacatcgccggctctgtcgcttcatatcagctcaccgacgcttttcgcagattagcacgtccttcatcgcctctgactgcctaggcatccaccgtgtacgcttagtcgcttaacctcacaacccgaaactgtctcggactgttcagcttgagagacacctcaacaatacctcggcgatattattgagtatttcaatttttcagcttgttccagattgttaaagagcatctatcgctaaacagattcacctaaatccgcttaaagataacctgacaacgcctttcacccgtcatcccgcaatatggcgtcccctaggggattcgaacccctgttaccgccgtgaaagggcggtgtcctaggcctctagacgaaggggacccgcaggtcagcttcgcagactcatttgcactctattttcatcagacaatctgtgtgagcactgcactcaacctctctcaggtaaggaggtgatccaaccgcaggttcccctacggttaccttgttacgacttcaccccagtcatgagccacaaagtggtcagcgcccccctttcggttaagctaccgacttcttttgcaacccactcccatggtgtgacgggcggtgtgtacaaggcccgggaacgtattcaccgtagcatgctgatctacgattactagcgattccgacttcatggagtcgagttgcagactccaatccggactacgacagactttgtgtgttccgcttgctctcgcgaggtcgcttcactttgtatccgccattgtagcacgtgtgtagccctactcgtaagggccatgatgacttgacgtcatccccaccttcctccggtttatcaccggcagtctcctttgagttcccaccttcacgtgctggcaacaaaggataagggttgcgctcgttgcgggacttaacccaacatttcacaacacgagctgacgacagccatgcagcacctgtctctcagttccctaaggcacttcgctgtctccagcaaattctgaggatgtcaagagtaggtaaggttcttcgcgttgcatcgaattaaaccacatgctccaccgcttgtgcgggcccccgtcaattcatttgagttttaaccttgcggccgtactccccaggcggtcgatttaacgcgttagcttcggaagccaccgttcaagaccgcaacctccaaatcgacatcgtttacagcgtggactaccagggtatctaatcctgtttgctccccacgctttcgcacctgagcgtcagtcttcgtccagggggccgccttcgccaccggtattcctccacatctctacgcatttcaccgctacacatggaattctacccccctctacgagactccagtcaaccagtcttagatgccattcccaggttgagcccggggatttcacatctaacttaattgaccgcctgcgtgcgctttacgcccagtcattccgattaacgcttgcaccctccgtattaccgcggctgctggcacggagttagccggtgcttcttctgcgggtaacgtcaaaatctaaccctcttcaggctaaacccttcctccccgctgaaagtactttacaacccgaaggccttcttcatacacgcggcatggctgcatcaggcttgcgcccattgtgcaatattccccactgctgcctcccgtaggagtctgggccgtgtctcagtcccagtgtggctggtcatcctctcagaccagctagagatcgtcgcctaggtaggccattaccctacctaccagctaatcccatctgggttcatccgacggcgtgaggccctttcaggtcccccactttggtctcgcgacattatgcggtattagccaccgtttccagtggttatcccccgccctcgggcagatccccagacattactcacccgtccgccgctcgtcagcaaaagcgcaagcgctttcctgttaccgcccgacttgcatgtgttaggcctgccgccagcgttcaatctgagccatgatcaaactcttcaatttaaatcaaagtttgatgctcaaagaattctgactaattatttcgtaatgaattaactgttgttcactcttcaagactttaaaacgtatttttttgtgatacggtcttgtgagtgcccacacagattgtctgattaattgttaaagagcaggctgacataaaaaataacattctcgttcagccgggctgcgtatactacgctgttcacccgcagagtcaagcactgattatcgctttctctgcccgacctcacaatgtttatcagcgttgtgtcggtcagtggtggcgcattatagggcgttctttgacgctggcaagcatttattaaaaaaaaactgccgttcgcagtttttttcaacaaaatccgcgatttcgtgtttttttcatacaaaattgatggcatcgacaataattattcccaaactaaagtactattccacgtattggtactcgaatcatgccaacgattcattggaatttccttgatcaggatttattaaagtggtggatgaatcgtgacaatcttagtcaagtggtcgaacatttccatatagtaagattagtaatagaaccacaagtttgctttcttgctgcacaaaatgccacacaaaagcaaaagaagcagctcttacagataatagatgaaatgtatctactaaaaaccgggaaaaatggataggatcgattaccagtttcactacaccatttataaatcttgtggaaatccattcttatgctcttttgccaacctgtttaacctagtttaccagaactgctttgaagctattattttcgataaagttgtaccactgaaagctcataaaacaattgttaattctattacccaaggtgacagttacagtgcacttctcgcttgccgaaagttattaacagaacgcgaatgatcttatatagtagtgcattagattaatatccaaccaaacattgtctagataaaataagcaggactattaatggtaaaaaccgctcgtaatatggcggggctaccctggattgctgcaatagctttctttatgcaagctttagatgcaacaattctcaacacagcattgcccgctattgctgaaagcctcaaacattcacctctggcgatgcaatctgctgttgtcagctatactctgactgtcgctttgctaattccagtcagtggctggttagcagatcgtttcggtacccgccggatatttatgtttgctgtatccttattttctttaggctcccttgcctgtgctttgtcaggtaatttagcttttctagtggtttcacgtgtaattcaaggaattggtggcgcaatgatgatgccagttgcccgtcttgctttattacgtgcatacccacgcagcgaacttctacctgttatgaattttgtcaccataccagggttagtaggaccaattcttggtcccatgctcggcgggctattagtcacttatgctacctggcactggatatttattatcaatattccaatcggtttattggggattatttacgctaaaaagcatatgcctaattttacaatgccaaaacgttcatttgactttttcggtttcatactttttgggctgagtttaatcatggtttctgtcagtttggatttactaggagagagttcgttacccggctatatacctctgacaattatggttggtggttttatgatattatttggttatctgatgcatgctagaaaacaaccccaaccccttatcagcctggaattattccgtattcgcacattctctatcggtattataggtaatattgttacacgcttgggaacgggttgcattcccttcctgatgcctttgatgctacaagttggatttggttattcagcggtcattgccggaatgatgatggcaccaacagctattggttctgttatagccaaatctttcgttactaatgtattaactggctttggatatcgtaaaacgctggttagcataaccattattattggattaatgatttctcaattttcactgcaatcaccagaaatgtctgctgttcttttgtctattccactattcttactaggcatggctgtatctattcaatttacttcgatgaataccattactctcgctgatctgaccgataataatgccagttcaggaaatagtttattagctgtaactcagcagttatctattagcttcggtgttgcggtaagtgcagctattcttcgtttctatgaatctatgcctaatggaacaacagttgataacttccacagtacttttattaccgtaggaataatcactttactctcttcttccaccttcctactattacataaggaagatggagataacatgatcaagaaaaagaacacttaagaacgagaaactgaactacgctcaatcagtgtcggagtcaatactaataatttaggatcactttctgggttatccatccgataaagcaaagtatcaacagctaactttcctaactcatcttttggctgatgaatggttgtcaatggtgggatcatataaggggcaaggtcgatatcatcataacctatgatggaaatatcatccggtacagaaagtccggcttggtacagagcctgataagcgccaacggccattgcatcatttcctgcaaaaacagcttctggcggttctggatgttgtagtaattcctgcattgatttaaaaccaccagcaaattcaaaatcactgtaaatttcatatccgtcaggaatagtaaggccagcatttgccattgcctttctataccccttcaatcgatgattagcaggtgttttatcttgtggacctgcaatacaggctatttttttaaaaccacagctaataaggtgattagtggccatctcacctcccaacaaggagttgtcctgaataacatcaccgacaatatcaaatggagaccaatccatcataaccacaggtaaaggaggataacggcgcaaaacatcacaggaattgtgttgattttcagtacacataatcagcaccccatctactcgcttttgcagcaacgtttccatgctgtaatccattcgtttggtatcaccttctgtattacataagataaggctgtaaccacgctcataacagcttcgttcaacccctcttacaatttcagcataaaaaggattattactggtcgttaccaacataccaatggttttggtttgcttgattttaagacttcgtgcaagcgctgatggcgcataattcaattgctcaatcgcatcattaactttctttttcacaccatcactgacataacgattattattaataacatgagatacagttgatgtagaaacacctgcaaaacgagcaacatctttcattgtagccacagttaatcctgttcaattaaaaatgcatcaatttcatttcgccacggaacagaaggctgagctccctgacgggttaccgctatcgcagcagcagaatgagcaaatcgtatggcagataacatggattttctttccaataatgctgtcaccagcgcaccattgaaagtatctcctgccgcaacagtatctacaacgttaactttaaatcccggaacaatttttcctttctgaccactttcactcaaccataccccacggctacccaatgtgataattacagtttcaatacctttcccatgcagtatttgagccgcattttccgcatctgaatcattttctactttaatgccggtgagatattccgcttcagtttcattcggtgtaatgatatccaccaatgagagcaattgatcagataattttcgggccggcgccggattgagtattacttttgtattattttgtttagctattgttgcagcaagttgcactgtttccaatggagactcaagttgtatcaataatgcatctgcttcctcaataatattttggtagcgatagaaatattccggtgtcaacgctgcattagcgcctgcattgataccaataatgttttcaccttgatgattaacgaaaatcaacgctacacccgttgtttctcctttaatcacttcaatgccagaagtgttaatattatcctttgctaactgctgacagatacgaaaaccaatatcgtcctcaccaacacaagcaataaatgtaatgtcagcaccgctacggcctgctgctaccgcctgattagcacctttaccaccaaaagcaacctgatattgttctccgatcaccgtttcccccggtcgagggaatgacttaagattcaaaatatggtcagcattaatgctgccaagcaccgcaagttttgctgtactcattacatttattccttttcaattatgccgtcaccatcaccaataagtaacggcataaataccgatttattttttaataactaactccaattctacagggatgacggcctcaactttttcgcccctcagcactttatttgcagtctgaacaccaacgataccaatttgatcaggacgctgagcgattgtcgctcctagttttccacgttgaacagctttgataccatctccagtaccatcaaaaccaacaactaatacatcgcttttacctgctgtctgtaaagcgcgcaaagcacctaacgccatctcatcattctgagcaaatacagcttgtacagccggatgagccgtcagtaagttctgcataacgttcagtcccttggttcgatcgaaatcagcaggctgactagctagcacattaaatttatgttcctgtgctaccttattaaatccttcaccacgttcacgggcagcagaagtgccggcaataccttctagctgaataattttggcttcattccctaatttttcggcgataaaatcacccgctattttaccccccaagcggttatcagaagcaatatgactgacaacagtacctttattcgctatccgatctagagtaataaccggaattttggcattgttagccataataatagcattaccaacagcatcggagtcagtcgggttaattagcatgagtttagtaccacgtaccgtcaaatcctgaacattagctaattctttcgctggattatcctgagaatccaacacaattaggttatagcccaacttatccgcctctttttgagcactatctttcattgtgacaaagaatggattattcagggtagaaatgactaacgcgatagtgtctttcgccaatgcatttacacttacagtcatacttagcgcaacagcagataaaattgttactaatttcttcactttcatcgtgttatttcctgtagggtgaggttatttaccacttttgttatcaaccagaactgccaacaatattacaattgctttaacaatcatctgatagttagaagaaatacctaataagtttaagccattatttaaaaaaccgaggattagtgcaccaatcaaagtaccaataattaaccccttaccaccagccaggcgagttcctcccagaactacggcagcaatagcatctaattcataacctccccccgccataggttgagcagaagaaagacgagcaacttcaataatacttgccaatgccgtcaggaaaccgcataaggagtaaacgataattttaattttatcgatattgataccagataaacgggtagccgattcattcccccccaaggcataaatataacgacctaaacgggtgtgatgcaggatataccatgtgataacaaaaactatcaacatcagccatactggagtaggaattcccagtgggcgaccaataccaaaccagccaaacagatcggcattatcactgaatcctgtatttattggactaccatcagtatagacacgggttattccacgaagtaataacatcatgactagagtggcaataaaagcctgtactttacctttagcaattattattcctgtacaagcaccaattgcagcacctaaagccaaagcactcacgatagccaccagagcattaacttccgtaccaaccaatgaagctactattgcacctgttaacgcaagcaatgaaccaacagacaggtcaatacctgatgtcaggataaccaatgtcatcccaacggccataatggcattgactgatgtttgttgcagaatattaaacaagttatttaaagtgaaaaagttttggctaagagaagaaactactgctatcagcactagcaacgcaatcagtgacttttgtttcagtaaccactctttagtaaaccaacgtttaaatgtcggtgatatattagaattcatactgaattactcctgaatcgctccatattgtttgcctacagccgctgccatcaaaatttcttgagttgcctgttcagcaaaaaattctccactgatctggccttcacacataaccaaaatacgatcactcattcctatcacttctggcatttcagaagaaacgagaataatgcttaacccctctttcttgaattgattaattaactgataaatttctttttttgcaccaacatctacaccacgcgtaggttcatccagaataagaacttttggtctggtcattaatccacgggcaatagctactttttgctgattaccaccagaaagtaaaccaataacttgtcccattgaaggtgtcttgatactaaacaatttaataaagtcactaactgcattctgttcttctttatgattaagaccacctaaccggttactgaaataacgcaaggcagtaagagacatattatctttgattgacattcccaaaactaagccatcacgtttacgatcttctgaaatataaacaatcccacaagctaacccatcctgagggttacgaattacaatgggggttccatccagtgtgatttgcccctgagtttttggcaacgcaccataaataattttcatcaattcagtgcggccagcccccattagccctgatatacccaaaatttccccgctataaagggaaaaactggcatttgtcacaccggggccagaaatctgcttaacttcaagtcgttttttaccccgaggtaaattcaggcgaggatactgatcttccagttttcgcccaaccatcatttcaatcagagtctcttcttttagctcttttactgacttttcaccaataaattgtccatcacgaaataccgttacatcatcgcaaatttcaaaaatttctctcaaacgatgggagatataaacaatgccacatctctgagattttagttcatatattacgcgaaataatgattcagtttctgtatcagtcagcgcatccgtcggctcatccataatgataactttggatttaaaactcagcaccttagcaatttcaaccatttgttgatcaccgatagaaagttcagcgactaaacggtgactgctgtaactcagattcaatttttttaacaggcgatcggcttcctgatacatttttctccagtcaattgcaccgaatttattaacaaattcgcgtcccaggaaaatattttcagcaatagtcagttggggaataagatttaattcctgatggataatcccgatccccgcttcctgagaggatctagggccagaaaaaatcacttcttttcctaaataatgaactgtgcctgtatctctggtatatatcccagtcaacactttcatcatcgtggacttacctgcaccattctctcccaccagtgccatcactttacctggataaacacgtaatgccgcaccagataatgctttgacaccaggaaaagatttactaattccttttagttccagtacaggctgcataatcacctcagaaagtcacaccagcaccaaggataatattggcataaggagaatgctctcctgtgcgaatcactgctcggctatgttttgttttttctttcaacacattatgactaatataatctacagtaattgaattcccttgctgtttctcaagctctttaatttgagttaatattaattgatgtattaaaggattatggccaatgatctcctcagctaagaatgcagcttcaatctgcatttcttgtgtaacaacattaagaacggatataaaactgggaattccctgggttagcgctaaatcaatccgctgggctaaagaaggaattggtaatccagcatcaccaattgtaatctggtcagtatgccctagctgagaaattacggctgaaatttcagaattaagtaatacaccttttttcatttttttattccattagcgaaacgtttcgctatttagtaatatagaaagtaatatttaaaatgcaacattagtgatacaaaaatgtgatcactatcgaaacgtttcgataataaaagaaacgaaaaaaaacgttaacttattgaatatttgacgctgaatcgatttttaaggtaaatattgtctatatcaacaaataatgattaaaatctatggagaaggttaattaggttttatctaatccaacagataatattggtaagaatcatgttgttagcagaaaaaatagtttgcttaagtcattatctggaaagtggtctgtatgaaagacaacagactattcgtttatgtttgctagcggcattgtgtggggaaagtgtttttctacttggtcctccaggcatcgcaaaaagtttgatagcccgccgattgaaatttgcatttcgtgatgccagagcatttgaatatctaatgactcgcttttcaacccctgaagaaattttcggccctctctctattcaggcactgaaggaagaaggacgttatcaacgtctaaccaacggatacttacctgaaactgaaattgtcttccttgacgaaatatggaaagccggcccggcaattcttaataccctactgactgcaattaatgaaagaaaattcagaaatggggatacagaagataaaattccaatgcgattacttataactgcatccaatgagctacctgaagcagataacagtctggaggcgctttatgacagaatgctaattcgtatctggctggataaaattcaagaaaagaagaatttccgagcgttactctctagccacaaaaatgaaaatgataaccctgttccggcaaacattcaaataacaagtgaagaattccatcaatggcaaaaagagattgataaaatagttttaccagacagttgttttgatattatttatcatctacgtcagcaacttgatgcaacagaacattcaccttacgtttcagacaggcgctggaagaaagccattcatttattacaagcaagtgctttcttcaatggcagaaaagagatatcacctcttgatttaatattactgaaagattgcctgtggcatgatcttcactcttttaaattattaccccaatacttgaatactctgatgaccgaacaagcatataggcaaagaatattatctcaacaaattgattcgctttatcaccaatggactcaagcctgtcaggataaaaatgatcagcaggcgttaaagctggaaaaacaaacccgtctgtttggacgtaaaatacaatattctctacccgatcatatcaatgaagaaaaattgattctattcctgcatacacctcttcatctccatgatattaaagttaattttattgaattggaaaaaaaagcgttgaatatctggataaacaaaggcagagaattatcagcacgtctgaacggcattggttttccacaaaatatagcagccgaagttaattcagcacatcagccagagatttttgatatcagccgccgttcatccacgctatatttaccagatcatcaacatcagcaaaatgaagaaaacaacgagtggcaggaaagattagaaaaatttaatcaagaaatccatcaccaacaccaattgtttaatcagcatcagccatgtttatttattgaaagtcattggcttgctacgatagagcaaagctttatccagttatcagataaaattaagcagttgaaaataaaaataggcagctaattaaatgattagtttgacaacccttgatctcttactgtcaataaacgaaggagagatgatagaagagatcatattaacgcttttagcttcacctcagttagctatcttttttgaaaaacatcctcgcttgaaacgtgcactattaaaagatatccctggctggaaacacgatttacagcaaaggattaaagaagcgctcattcctgtaactctggcagaagaatttcagttatatcaacaaatactgtctgccaatacaaattatttttaccttaaacttcccgatattttagaaacgctgaaccgaattgaatccccttttagtgaagaagcacagaaactcgcaaccaacaccattgctgattcaaatacactacaaaccctatttattcaacgatggaggatcagtttgatcctgcaaactacaaccttccataagcaattgctggagcaagaaaaagagcaattactggcagaactgcaacaaaagctgacactaagcggtaatcttgatcctgtttttagtgaaaatgatagggcagcggggcgattatgggatatgagcaaaagtcagttaaatcattctcaaaatgataagcagttattgatccactatagtgaatttcttcaccaacagccggaactgaaaaaattagctcaattacttggacgcagccaatctgtaaaatcaaaaccacaagaaaaccattttttcgaaccagttactacaatcgagcgaacacccgacatcattcctgaacaggtaaatggtatcggacaaagtgatgatattctgcgcctattaccaatagaattagcaatattaggaattgaagatctggaatatgagttttatcgcaaattagtggaaaaaaaactcctgacctatcgcttacaaggtgataactggcgagaaaaaacaacattacagccagtcactcattatagccaggaagaaaaacctcaaggaccatttattatttgtgtagatacttccggttctatggggaaattcaatgaaaaatgtgccaaagctttttgtctggcactgttacgcattgctctagctgataatcgcaactgtcatatcatgctatttacaacgggaattgtgcactatgaactatcttcaccagatggtctggagcaagctactcgttttctcagccaaactttcaaaggagggacagatctcgctttctgtctgacaagcacaatagaaaaaatgaaagaaaaatgttggaaaaatgctgatgctgttgttatctcagatttcattgcccagcgtctgccgaactcactaatccatcagataaaaaatctgcaactgcatcagcaataccgcttccatgcggtctccatgtcccaatatggtaagcccgatattatgcggatatttgatcatatctggcactttgataccggacttaaaagccgtttactgcgaaaatggcgtcactaacttgaattaaagcatatcttctacagtttcgcgtacttcaggtgaccagatactgcactgaacttgaccaatgtgtttcatttgcagcagtaacatcactaagcgggattgaccaataccgccaccaatcgactgcggcatgtcgcctttgagtaacgcctgatgccaatcatattgtaaacgctcttcatcactagtcagagctaactggcgctccaatgcttctgcatcaacacggatacccatagaagagatctcaaacgcatcttccaaaacagggttccagacaatgatgtcgccatttagaccaacgaaaccatcgctgtttggtgtcgtccagtcatcataatcaggcgcacgcacatcatgagattgaccatcagataatttcgcaccaataccaatgaggaaaacagcacccaattctttagcaatagcccgttcacggccttttgcatccagatccggataacggctcagaagcgtttcgctatgaacaaagtgaatttgatctggcaggaacggtgccagaccaaactctttgttgacagctttttctgtttcttttattgcttcgtagattttacctactgtctgtttaagataagcaagtgagcgttgcccatcttccatcactttttcccaatcccattgatcaacataaacagagtgaattggtgttaagcgatcctcatctggacgcaatgctttcatgtgagtgtaaagcccttgttcaggctgaaagccaaaacgacccagtgtcctacgtttccatttagccaacgaatgtacgacttcgaaagttgaatccggtaaagtttttactttcacctgaacagctttttcatggccggacaagttgtcctgaataccatctcccaaacaacttaggattggtccctgtacttcaatcagacccagtttgctttccagcagacgggaaaagaaggatttaacaaaactgatttgttgctgcttttcaataaacgactttttcataatgttattctctaattttttaggtgaccctgatgtcctgttggaaacattaagcaataaaatgagggataaattcaatatactttaataaaaatagactttatgattcataaaattcatttttaagattaaaaaaatgaaaattcattaaaaaaaggcgctgaaaatggcagaaatttatcagatcgacaatctagaccgtgacatacttcacgctttaatggacaacgcacgtacaccttatgccgaactagcaaagaaatttgctgtcagtccgggaacaattcacgttcgcgtggaaaaaatgaagcaagcaggaatcattaccggtaccagagtcgatatcagcacgaaacaacttggttatgatgtgtgttgctttattggcattattctcaagagtgctaaagattacccatcagctctaaaaaaactagacaacctggatgaagtagttgaggtttactacacaacaggccactacagcatctttattaaagttatgtgccgttcaattgaatcccttcaagatgtacttatcaacaaaatacagactatcgatgaaattcaatcaacagaaaccctgatctccttacaaaacccgattatgcggacaatcaagccataacataaaatttgttataaccatattatccacaggtagatcccaacagattcacagcgtacaatagcgactcttaaaatctgttgggatcactatggctactattaccttaatcagcggcagcacaatgggcagtgccgaatatgtagctgaacatatggctgaaattctggaagatgctggtttttccactgaaatgctacatggcccctccttagatgaacttcctcaggaaggaatctggctagtcgtcacatccacacatggagcaggagaattgccagaaaatatacaaccattggccgcagaaatttctgaccaaaaacccgatctcagcaaggtaacgtttggtgctgttggccttggtagttccgaatacgatactttttgcggtgcaataagatcatttgaccaactattgatagaaaatggtgctaaacgtctcggcgatcgtctggaaattgatattcaacaacatgagatccctgaagatccagcaggagaatgggttaaatattgggcaaacacactctaataagaacaaaaaaacagcaaacgattgtggataactcatctaaaaagccggggttaacccgtagttatccatagtataactatatgacaatgatcaccttgtgaataactaccgatttagatcccagtttataccttgtgggatcacggatcattcacaacaaatgatcctttacagctttatgatctttctaaggaaaaataacttatccacaaaagatcatgatcctaataaaagatctaataaacagatctttaaataaaaaagatcttcttttaattaccggtgatctcacccacttggtctatcaccgaaacttgagtagaattctcctcccttaatgcaacactgagcatttttataactaaaggttcatcaccatgttttatccagaacaatttgacgtcatcattatcggtggtggtcacgccggtaccgaagcggctatggcagccgctcgtatgggtcgtcaaaccctattgctgacccacaatattgacactttgggccaaatgtcatgtaacccagccattggtggaatcggtaaagggcatctggttaaagaaattgatgcgcttggtggcttaatggctaaagcgactgatcaagctggtatccaatttagaactttaaatgccagcaaagggcccgcagttcgtgcaacacgtgcccaagcagatagggttctctatcgtcaagctgtacgcatggcattggaaaaccaacctaatctaatgatcttccaacaacctgtagaagatctcattgttgaaaatgacaccgttactggcgcagtaacacgcatgggccttaagttcagagctaaagctgttgntttgactgtaggaacatttcttgacggtaagatccacattggtttggaaaattatagtggtggaagagctggtggtcccccagccatttcgttggcacagcgcttacgtgaattgcctttacgtgtaaacagattaaaaacaggaacaccaccacgtattgatgccagaactatcgattttagtcagctaacacaacaactaggtgataatccaacgccagtattctctttccttggaaatgtgaagcaacatccacaacaaataccgtgttacatcacccatacgaatgaaaaaacccacgatgtgatccgcaataatttagatcgtagcccaatgtatacggggatcattgaagggatcggtcctcgctactgcccttcaatcgaagataaggtcatgcgttttgcggatcgtgatgcccaccagatcttccttgaacctgaaggattgactagtaatgaaatctatccaaacggtatttctaccagcttaccgtttgacgtacagatgcaaattgttcactccatgaaaggaatggaaaatgctcgaattattcgtcctggttatgcaatagaatacgatttcttcgatccaagagatctgaaacaaacattagaaagtaaatttatccacggtctattttttgctggacaaatcaacggcacgacgggttatgaagaagcggctgctcaaggactcttggcaggccttaatgcagctcgttacgcttcagaagaagaaagttggttccctcgccgtgatcaagcttatattggcgttttagttgacgatttatgtactttagggactaaagagccgtaccgtatgtttacttcacgagccgagtatcgcttaatgttacgtgaagataatgcagacctgcgtttaacagaaaaaggccgtgagttaggtctggtagatgattcacgttgggaacattattgccgtaaattggaaatggttgaacaagaacgccagcgtttacgtaatatttggattcaccctaattcaaataatcttaatgatataaacaatatattgaaaatgccattgtcgaaagaagctaatggtgaagatctactacgtcgtcctgaaatgaactataaacttttgacctcattgcccctgttttctccaagtcttgaagaaccacaagccgctgatcaagttgaaattcaggtcaaatacgagggatatattgcccgtcagcaggaagaaatcgaaaagcagctacgtaatgaaaacacatcattaccagtcgatctcgactaccgccaaatcagcggtctttccaatgaagttgtcgctaaactcaatgatcataaaccgagttcaattggtcaggcttcacgtatttcaggggtaacacctgcggcaatttcaattttacttgtgtggttgaaaaaacaaggattattgcgccgcagctcctgagaggatcttgattatgcttaacaaactagaattgttgctgaccaaagcaggaatagaactgtcactacagcaaaaacagcagcttgtagcctatgttgatatgctcaataagtggaataaggcttacaatctcacatcagtacgtgagccagaacaaatgctggtgcgtcatatcatggacagtattgttgtcagcccttatctgcaaggccatcgttttattgatgtgggcacgggcccggggttgccaggtattccgttagctattgttcgtccagattctcatttcacattgctggatagtttaggcaaaagagtgagatttttgcgtcaggttcagcatgaacttgatttggtaaatatcgaaccagtacaaagtagggttgaagcgtattcttctgaaccaccttttgatggcgtaataagccgtgcttttgcttcgttaaaagatatggtctcttggtgtagtcatttgcctgagcctattcatggacgtttctatgcacttaaaggtgtgcttccagaagaggaactgactatcttgccttttggaatttctatcgattcggttattaaattaaatgttcctgaactggaagggcaacgtcatttggttatccttaaatcaaactaattttgttatttgtcaataaagttataaataattagtgatgttgagcacaattatactgtagtcagcatcgttaattatggtttgcatcgtttcagctttaatttaccgagttattacataaaaataacgttatcttgatattaagatagttgaacctttaaaaatcagataaagcattttttcatcagatccacttttttaaactagctaaaaattagcttgggaatttaagtcaataatataatcactcttttgtatggaattaaattaaccaattgattttattattaatgtattttattttcatttactgtgaatgttaaatataattaacaaataaaaaatttatgtgatttaaatcacatttgtgcctgaaatgtatgaaattattaaaaacaagaaatcagcacaatcattagcttgcaatcgggcactaaaataaaaaatttaaataattgttcaccttttcgctacttatagattgaattcattttggtggcccgtataatttgcacgtttttgtcacttgacactcttaagcaaaggcagttttatacaacatttagcaaaacctgatatgcaaggcgtgcaaggggagaaaacaaaagtcatgtctgtatccctttacagcggtaaaattgcactgaagctgctttttttgcagttaatgacttttgttgttctcagtgtggctttttgcaccaaaagtatagaatggggcgcttctgcttttgctggtgggttagcatgttggttacctaatgccatattcatgctgtttgccagttttcaaaaagcaaaagaagaagaggttcctgtacgtattgcgtggtctttcgctgttggcgaagggttgaaagttattattacaatagctgtgctggttgttgctttaggcgtgtttaaagcggcgtttgcaccactaggtttagcttatttagcggtgctgattgtgcaaattatcgcacctgctgtgataaacgattaggttttcaacaataaaagggtaagaggcatcatgtctgcatcaggagaagtttcaactgcaagggactacataggccaccacctgaataaccttcagttggacctacgtacctttgagttggtcgatcccaactctggtggttctgcaacgttctggacgttgaacattgactcgctttttttctcagtcgtattagggattttatttctgtatgtattcagaaaggttgcggttaatgccaccagtggcgtacctggcaaacttcagactgctatagaattgatcatgggttttgttgataacagcgttcgtgatatgtatcacggcaagagcaaggttattgcccccttggcactgacagtgttcgtttgggtgttattaatgaacgtgatggacttattgccaatcgattttctcccttatatcggtgaacatttctttggtttacctgctctgcgtgtcgtgccaacagcagatgtcagtgttaccttgtcgatggctattggtgtctttgtcctcatcctctactacagcattaagatgaaagggattggtggttttacaaaagagctgactttacagccttttaatcatccactgtttattccaattaacttaattctggaaggagttagcctgctttcaaaaccggtatcactcggtctgcgactgtttggtaacatgtatgcgggtgaattgatctttattcttatagctggtctgttaccgtggtggtcgcagtggttactcagcctgccttgggctattttccacatactgattattacgttacaagcctttattttcatggttctgacgattgtttatctgtcgatggcatctgaagaacattaattttttaccacaataactaactgtgttttaactgaaacaaactggagactgtcatggaaaacctgaatatggatctgctgtacatggctgccgctgtaatgatgggcctagcggcaatcggtgctgcgatcggtatcggcatcctcggaggtaaatttttggaaggcgctgctcgtcagccagatttaatccctcttctgcgtacacagttctttatcgttatgggtctggttgacgccatcccaatgattgctgtgggccttggcttgtacgtaatgtttgctgtcgcgtagtttgtagaaataatctgaaactacgtcaactcattaattttaaaagaggtattgtgctgtgaatattaatgcaacaatcctcggccaggccattgcgtttgtcttgtttgttatgttctgtatgaagttcgtatggccaccgatcatggcggccatagaaaaacgtcaaaaagaaattgctgacggtttatcttctgcggaacgtgccaaaaaggacctggacttagcgcaagccaatgcgaccgaccaaatgaagaaagcgaaagtggaagctcaggtcatcattgaacaggctaataaacaaaaagcccagatccttgatgatgcaaaagcggaagctgagcaggaacgtaacagaatcgtaacgcaagctcaggcagaaattgatgccgagcgtaagcgtgctcgggaagagttgcgtaagcaggtcgctatgttggctatcgcaggtgccgagaaaatcatcgaacgttccgtggatgaagctgctaatagcgacatcgttgataaactggtcgctgaactgtaaggagggaggggcatgtctgaatttgctactgtagctcgcccctacgccaaagcagcttttgactttgctgtggaaaaacaatcgcttgaacaatggcagaatatgctggcgttcacagctgaggtgactcgtaatgagcaagttggtgagctgctttctggttcattggcatcggaaacattagctaatacctttatcgcaatttgcggtgaacaggtcgatgaacatgctcagaactttattcgtgttatggcagaaaacggtcgcttattggcattgccggaagttttgcagcaatttattcaattgcgtgcatcacttgaatcaaccgttgatgttgaagtgatttctgccaccgaactgagagaacaacagctggctaaaatttctgtagcgatggaaaaacgtctgtcacgcaaagttaagctgaattgcaaaattgataagtctgttattgctggtgtggttgtccgcgcaggtgatttggtgatcgatggcagtattcgtggccgtttagatcgcttaacagacgtcttgcagtcttaaggggactggagcatatgcaactgaattccaccgaaatcagcgaactgatcaagcagcgcattgctcagttcaatgtagtgagtgaagctcacaatgaaggtacgattgtatccgttaacgacggtatcattcgtattcacggtttagccgaagttatgcagggtgagatgatcgcactgcctggcaatcgttatgcaatcgcattgaacttggagcgtgactccgtaggtgcggttgtaatgggtccgtatgctgacttagcagaaggtatgaaggtcaaatgtacaggccgtattcttgaagtacctgttggtcgtggtctgcttggtcgtgtagtaaacacgctgggtgagccaattgatggtaaaggccctgttgagcatgatggtttctctgctgttgaaatgatcgctcctggtgttattgatcgtcaatctgttgatcagccggtacaaactggttataaatccgttgacgctatgatccctatcggtcgtggtcaacgtgaactggttatcggtgaccgtcagacgggtaaaacagcactggctattgacgcaatcattaaccaacgtgactcaggcataaaatgtgtctatgtcgcagttggtcagaaagcttctactattgcgaacgttgttcgtaaattagaggagcatggtgctcttgccaatactattgtggttgttgcgactgcttcagaatctgcggcattacaatacctggcaccatattcgggttgtgcaatgggcgaatacttccgtgaccgcggtgaagatgcgctgattgtttatgatgatttgtctaagcaggctgtagcttatcgtcaaatttctctgttgctccgtcgtccgccaggacgtgaagcattcccaggtgacgttttctatctgcactctcgtctgctggaacgtgctgcacgtgttaatgctgaatatgtggaaaaattcaccaatggtgaagtgaaaggtaaaaccggttctctgacggccctgcctatcattgaaactcaggcaggtgatgtatcagcattcgtaccaacaaacgttatttcaattactgatggtcagattttcttggaatctagtttgttcaatgcggggattcgtccagcagttaacccagggatttccgtatcccgtgtaggtggcgctgctcagactaaaatcgttaagaaactgtctgggggcattcgtactgctctggctcaatatcgcgaactggcagcgttttctcagtttgcttctgaccttgatgatgcaacccgtaagcagttggatcatggtcaaaaagtaactgaattgctgaaacagaaacagtatgcgccaatgtctgttgcacagcagtcattgtctctgttttctgcggaacgtggttatctggaagatatcgaaattgctaaggttattgatttcgaatctgcgttgcttgcatatgccaaccgtgaacatgctgatcttctaaaagagattgaccagtctggtggttacaacgaagagatcgaagcaaagctgaaagctctgctggattccttcaaggcaactcagtcctggtaacactattcggcccggtttaattaaacatgggccgtctggttaatgaggagaatcaggaatggccggcgcaaaagagatacgtaccaagatcgccagcgtgcaaaacacgcaaaaaatcactaaagcgatggagatggttgctgcgtccaaaatgcgtaaaacgcaggatcgcatggcggccagccgtccttatgcagaaaccatacgcagcgtgattggtcaccttgcgttaggtaatctggaatataaacatccgtaccttgaagagcgtgaaaccaaacgtgtcgggtatctggttgtttctaccgatcgtggcttgtgcggtggtttgaatactaatctgttcaaaaaactgctttcagaaatgaaagactggtctgataaagatgtccagtgtgagctggcgcttatcggctctaaggctacctctttctttgcttctgttgggggtaacgttgttgctcaggtaacaggcatgggagataacccttcactgtctgaattgatcgggccagtgaatatcatgctgcgggcatacgatgagggacgtctggataaactgtatgtggtgacaaacaagttcatcaatacaatgtcccaggaaccgactattactcagttattacctctgcctgccggagatgatgaaacactgaagaagaaatcctgggattatttatacgaacctgatcctaaggcgttgctagatatactgctgcgtcgttatgtagaatcgcaggtttatcagggcgtcgttgaaaacctggctagtgaacaggccgcacgaatggtggcgatgaaagccgcaactgataatggtggcagcctgatcaaagagttgcagttggtttataacaaagctcgtcaggccagcataactcaggagctgaccgagattgtctcgggtgcttccgcggtttaacagctaggtttatgaattacgtagaggattcaagatggctactggaaagattatccaggtaatcggcgccgtggtggacgtcgaattccctcaagataccgtaccaaaagtatacgatgctcttgaggttcaaaacggcgaagctaagctggtgctggaagttcagcagcagttgggcggcggcgttgttcgttgtattgcaatgggtacttctgatggcttaagccgtggtttaagtgtcactgatttaggccacccaattgaagttccggttggtaaagcgacattgggccgtatcatgaacgtattgggtgaaccaatcgacatgaaaggcgatatcggtgaagaagagcgttgggctattcatcgtccggctccaagctatgaagaattatctaactctcaagaactactggaaaccggtattaaggtaatggacctaatttgtccattcgctaagggtggtaaagttggtctgtttggtggtgcgggtgtaggtaaaaccgtaaacatgatggagttgatccgtaacattgcgattgagcattcgggttactctgtatttgccggtgtaggtgaacgtactcgtgaaggtaacgacttctaccacgaaatgactgactctaatgtactggataaagtatctctggtatatggtcagatgaacgagccgccaggaaaccgtctgcgtgttgcgttgacgggtctaacaatggctgagaagttccgtgatgaaggccgcgatgttctgttatttgttgataacatctatcgttataccttggcaggtactgaagtatccgcactacttggtcgtatgccatctgcggtaggttatcagccaactctggcggaagaaatgggtgttctgcaagaacgtattacttctaccaaaaccggctctatcacttccgtacaggctgtttacgtacctgcggatgacttgactgacccatctccagcgacgactttcgcccacttggacgcgaccgtagtactgagccgtcaaattgcttctttgggtatttatcctgcggttgatccgttggattctaccagtcgtcagctcgatccattggttgttggtcaagagcactataatgttgctcgtggcgttcagtctatcctgcaacgttatcaggaactgaaagatattatcgctatcttgggtatggatgaactgtcagaagacgataagctagtagttgcgcgtgctcgtaagatccagcgcttcctgtctcagccgttcttcgttgcagaagtctttactggttcaccaggtaagttcgtttccctgaaagatactatccgtggctttaaaggtatcttagacggcgactatgaccacctaccagaacaggcattctacatggtaggtaccatcgaagaagctgtggaaaaagcgaagaaactttaatacggctgaccggaggttgacatggctgcaatgacttaccatctgaatgttgtcagtgctgaaagccggatgtttgaaggcttggtacagaaaattcaggtgacaggtagtgaaggtgaactgggtatttacccagggcatgctccgctactgactgccataaaacctggcatggtacgtattgttaagcagttcggtgaagaagaggtcatttacctttctgggggtatccttgaggtacaaccgagcggcgttatcgtactggctgacactgcgatccgtggtaaagatttggatgaagctaaggcgttggaatctaaacgtaaagctgaagaacacatccgtaattctcacggtgatgttgactatgctcaggcatcagctgaattgtctaaagcgattgcgaaacttcgtgtaatcgagttaacaaaaaaagcgatgtaatataggcagttaaataaaaaagccagttggtgcgagctaactggcttttttgtattgcgaaatatgtagtaatttatcttataagcaggtttacttttctctcttaaattggagttatcgggtttcttatgtctaacagtgcaaaaagtgttgtgatccttgccgcgggtaaaggaacccgcatgtactctgatctccctaaagtgctgcacttgctggccggtaaacctatggttcagcatgtgattgatactgcaatggcattaggggctaaaaatgttcatctagtttatggacatggtggtgacctgatagagcaaaccctttctgatcaaacactgaactgggtattacaagcagagcagttagggactggtcatgcgatgcagcaggcagcaccacatttcgctggtgatgaagatattttaatattgtatggcgacgtaccgcttattggtgcagatacccttgaacgcctactcgctgttaaacctgagggtggtatcggtttattgacagcaattttggacaatccaacaggttatggtcgtattgttcgtgaaaacggagaagtaacgggcatcattgagcaaaaagacgcgactgaagaacaacgtaaaatcaatgaaataaacacaggtattttggttgctaatggtagtgatttaaaacgttggttgtcccaattggataacaacaatgttcagggtgaatattaccttactgatgtgattgcgttggcttataaagaaggtagaaaaattgaagcggtgcatccaactcgcttgagtgaaatggaaggtgtaaataaccgtcttcaactttccgctcttgaacggatttatcaatctgagcaagcggaacaattattactagcgggtgttatgttgttggatcctgcccgttttgatttacgtggtacattaattcatggccgtgatgtggttattgacactaatgtcattattgagggtaatgtaacccttggtaataacgtacagattggtaccggttgtgtgttgaagaattgcatcattggtgatgattctattattagcccctatacaatagttgaagattctgaaatggaaactggttgtactgttgggccttttgcacgtttgcgtcccggttctaaacttgctgaaaaagcccatgtagggaatttcgttgagatgaagaaatcttatctgggtaaaggttctaaagctggacatttgacttatcttggcgacgcagatattggtcgtgatgtaaatattggtgcaggtactattacctgtaattacgacggcgctaataaatttaagaccattattggtgacaatgtttttgttggctctgatactcagcttgttgctccggtgattgttgctaaaggcgctacaatcggagcggggacaacagtgacaaaaaacatcgctgaaaatgagctggttgtaagcagaactaaacaaacacatattcaagggtggaaacgccctgtgaaggaaaaaaaataaaataataatccccactctacaggctcggggaccggaaaaaccggaaaacaatcaggctcttgacatataaagggctttcatcagccctatttttaggaataaaactgatgtgtggaattgttggtgcagtagcacaacgagatattgccgaaatcctgattgaaggacttcgtcgtttggaataccgtggttacgactccgctggtttggcggttgttgataacgaaaaaaatatgttccgcctgcgtgaagtcggtaaggtacaagtacttgctgatgaggttgataagcagccagtccttggtgggacaggtattgctcatacccgttgggctacacacggcgaaccgaacgagaaaaatgctcacccgcatgtatctgattatattgctgttgttcacaacggtattattgaaaactatgaagaattacgcgttcaattaattgcactcggttatcagtttatctcggatactgatacagaagttattgctcaccttgttcattgggaacaaaaacaaggtggtactttgttggaagctattcaacgagttattcctcggttgcgtggtgcttatggtgcagtcatcatggatagccgtgatcctggaacaataattgctgcaagatcgggcagtcctttagttataggcttgggcgttggagaaaactttctggcgtctgatcagttggcgctattgcctgttactcgtcgttttatcttccttgaggagggggatatcgctgaagtcactcgtcgtactgtgcgtatttttaatactcagggcaaaccggttgaacgggaacagattgaatccaatattcagtacgatgctggtgacaaaggtatctaccgtcattacatgcaaaaagagatctatgaacagccaatggcaattaaaagcactttggaaaggcgcttgagtcatggacaagtagatctgtctgaacttggccctaatgcagctaaattattagctaaagtagagcatattcagattgttgcctgtggtacatcctataacgcaggtatggtttcccgttattggtttgaagcattggctggtattccttgtgatgtggaaattgcttctgaatttcgttaccgcaaatcagcacgccgttcaggaagcttactgatcacattgtctcaatcgggtgaaactgcggatacattagcagcactgcgtttatccaaagaacttggctatctcacatcgttaactgtctgtaacgtagcgggttcttcattagtacgtgaatctgattttgctctgatgaccaaagctggtgcagaaattggtgttgcttcaactaaggcatttacaactcagttgacagtattactgatgctggtggcttaccttggacgtttgaaaggtgttgatgcagaacaggagcaagaaattgttcatgcattacatgcattgccaagccgtatcgaaggcatgttatcgaaagataaaattattgaagtgctggcggaagatttttctgacaaacaccacgctttattccttggccgtggtgatcaatatccgattgcggttgaaggtgctctgaaattaaaagagatttcttatatccatgctgaggcttatgctgccggtgaattaaaacatgggccattggcactgattgatgcagatatgccggttatcattgtagcaccgaacaatgaactgctagaaaaactgaaatctaatatcgaagaagtacgtgcccgtggtggattgctatatgtttttgctgatcaggacgcgggttttaccgatagtgaaggaatgaagattattccattgccgcatgttgaagagctgattgcaccaatattttatacagtaccactgcaattgctttcctatcatgttgctctgatcaaaggaactgatgttgatcagcctcgtaatttggctaaatcagtgactgtagaataatcgttttatagtaagaagttgaaataagcctctgtacattaaaaatacagaggcttttttttgaactgagaaaatttctcattattttcttgccgataaaaataaatcacgccattgtaatgttatattattacaatttggcgaaattatgaaaccagatatccatccaaactatcgggtagttgtatttcacgataccagtgctaatgcctattttacaattggctccacgattcgcacagaacggacaattactctgaatggggaagagtatccatatgtcactgttgatgtgtcatcggaatcacaccctttctatacgggtaagcagaaaactttatctcaggaaggcagtactgcgcgattccagaaaaaattcgggcgttttattggtaataaataaattgagagatcatggaaaaatgcaggtgttaagttcacttaaaacagcaaaaactcgtcatccggattgtaaaatcgtcagccgtcgtggtcgattatatgttatttgtaaatctaatccgcgttttaaggcagttcagggaaagaaaaagagacgttgatatccaattactaatagtagaactcgcagcttataactgcgggtttattgtccatatttaattttacttctgattatcttaaaaataactgacctaaactttatttgggagtgtagttagcgtaattaagtttaagataaataagatttagattttatgcaaaatgaaaccttattagtgcttgttgtatagtataaagttaaaccttaaattggttgcttttactacaaatttatcctccaaaatagttcataatttactcttatcaacacattttttcataaaccacagttctggtcatttattgacacccgaatatagccaatcttcgccatatgtaaccctgcctaataccagtatgagactattattgtcgaaattatcacgggttggcgagcttttaaaaaccttggtttgatagaaacgatgaatttggcgaaaaatgctcttcctaaggactcaactgaatcattcacatcaggcaatcacaatattaaaacaggtggaaattattccagtttgtcactaacaaagggagatggccgatatgttttcatagaaactacttctcatgaagaaggatctttttgtgcaataggacatcgtgagtctaattcctcaaatataaatgttgttcacctccctcgaaagagtggctatattgcaatagctaatgaacattattctaaatcagagtctgacagtcgatttattcagttaaataccgatacaaaaacatcaggttatatattagttaaaaccgcaaactattatgatgatcctaattcacgtcatttggggcgttcgggatttttgaggcccaatggaattgataatctgggggcattagcaattcatatagctcatcctgacgttgatagtccgcagcacgctcgtgggctttctttcggatatggcggttattcagaagcattcagcgtttctacttatgctttcgatgaaagtggtaactttagggggaaacgtaaaatattaacagaggatgatattcttgttggtattccactaccgtggtctaaaccaactgcaccagcaggttatcttatttgtagtggtcagcagtttgacaaatctatgtaccctaaattaggggaagcatatccctctggtgcactccctgatctacgtggtgaatttattcgaggttgggataatgggagaagtattgattctgggcgggagattttatctcatcagaattcaacaaagttaccgaatctttacacccatgcagcctctgaaaatatagggctactggtatctcctcctattaatcatttttcaagtaattatccatcagaaattatggctagtgattttgaggaagcagaattcgggagcggccaatatttttcgaccccattaaatcctactggttcagtttcattatctacatttagagtacgtccccgtaatatcgcatttaactatatagtgagagcagcgtaatgataacacagaaacaaaaatattccctagaactagaaaccgcaatattgggaaataatggattagcaaccaaagccggttggttgataatctaccatgcagagccttattccagagaatttattggtgccagaccagaatatttaatggaaggagtgggacttcctgccaattcttatccagatgcaccacaacttccagattctgatgacatggctgtttgccgcagcgaagataaaagttgttggcaaattgtacctgattaccgaggaaaaatagtttataacacacaaaccttagcacaatatgaaattacagagttaggtgaactaccagaatctctgacattcaaacaacctgtcactgattttgataaatgggatggtaaacagtgggtaactgacaaatatgcaataaaggatagccagattaaacaggcagatcagcagcgggtagcactattacgacaagcgaatgaaacagttacattattacaacatgctgtagatattgagttggtttcagaaaaagaaaaattattgttgttagattggaaaaagtatttagtattgcttagccggattgacatttcatcagcaccagatattaactggcctgaaaaaccagaataaataataacggcctgtttttcaggccgtagatttaagacttataaactaaattgnagggagtttatcatttctgaaaccatttttatattaaattaatcaacagctttttcagtaaacgtttttaattcttgaaataaaaatctcacaattaatttcagtaatttatgtatttatatttaattacatgttgttgtaattaaaacattaacattcaatgtcttctagtatcctacaaaaatcactaataataacaaggaaattatagttgattgtttttaatcattggtgttgttttgaatatagaatggaaagtttttaaaattatataaacagccaactcaatatggatggctatttataaatttcaatgttaaattttaattaaattaacaaatcaccaccttaaaaatgattaattttattctggtttttccggccacttaatatcttttgccgtggtatccattctatttaacgccacgcgatattttttcaactccatcaacattgttatttcactatcagtagcaatgcctaaatcaatagcatcttgcaatggtgaaattttaattgttgcttgttctaataaataatatttttggcggtgataggttttatttttctgttcgataatggcttgctgatataatgcttgagcttcttgagcactgaaacccattgagattaattgatggggttcagctggcacattaacatattcatagccatttttgtctattaatttatttaatattatcatatatcctcattacggtttcttttgataacgcgcgtcatattcaagagaataaggtactgtattatcagtatattcttcacctaataatggatcattgatggctaatgatttcaccatccacttcatttcccgtttaatatcttcacttgaccatctatgtatttctgcctctccttcttcacgtgaataatggattgactgaaaattgcttgtcgtaaaataggttaaaccaccacgtaaataacaaccactataaacgtaacaatctacaatatcaccggattttacatcaccataaaggggatatttgccgtcaatgggtctagcgatgcttatcatggcatgatggattgcttttaccgttttacgataggtttgatttatgcgtttaatattaagatagcgggcatcacctccccatggcacatctcctccttctatttgtacaagtagtccagcaacatgtgtcacaccttcaccgaatggttttttttctgcatcatatggatagggtctatgaagtgttaaccaagaattcgctccgacattaggtgggaggctccaccaaaccggataatagcgttcagtacttaggccagtaagatcaatcgtggtggtatagcgcggttcactctgaatatccgatgccgtgggtctattgagcgtgttatattcttgagcccaaggtgtccacggtaaattatgatattggctgcgcgtatatactcgactactgttataaacaaaataacgctgaatgatccctgcagcctgtaaaacaacaagcgaaccagcaagcggttcagggtagttagcaccattttgagcataaagattgtaatcttgataataaactcctggtattttgtagttatccaaatttgccttatcacccaaataaaccacttgcccattaaagatatcctgagacgtaatattgatatcctcagtcagaactttgccattcactttccggctattttgcactgctccctgagccaaattcatcgtttctatcaaaccaaggtttttaaaaactcgccaatccgtgataatttcgacaataatagtctcatactggtattaggcagggttacatatggcgaagattggctatattcgggtgtcaacaaatgaccaaaacagtgatttacagcgaaacgcattgataagtataaattgtgagcaaatttttgaggataaaattagtggaaaaacatccaacagaccaggtttaaaacgagctttaaaacaacttaaaaaaggtgacactctagttgtttggaaactagatagattggggcgtagcgtaaaaaatatggtaactttaatttctgatttaagtgaacgcggtattcattttcaaagcttgactgatagcattgataccagcacttctatggggcgatttttctttcacattatgagtgcactagctgaaatggaacgggaattaatcgttgaaagaacgaatgcaggattaatagcggctcgtgcccaagggcgaattggtggtagaccagtatcactttcattcgttgaacaacaacaagcagcaagattgctggcgaaaggccacacacggaaacagttatcattaatttacaacatatcgttatctacaatatataaatattttccagtaaataaaacaaattgtcgatcaaattagtatttgcagtgcggctagttaaatgtttaattttgtattcgtaatgtccaaggctaattggttattaatttatgcaaaatatatcacgtttcttttctatacaaaaaacgtctgccgcactataagataaagaaacaacggaataagttgacaatcagctattgctagcaaaagaatctattgtgtatgaaatccactgcatctggacgtttttaggtaacgaattgccatcagcataggatttatacatctaagtaaattaatttacacttgaaaagtgtgtcagtacctggaaatcattaggtaaacgcgaccaataaagttgatttcattaattgcacaatcaaaagttacgtcattatcacaaactcggatcttactgactgggatttttgtaatttttttaatgctgtgcatgccttcaatatcaattaaccataaaccatcctgaacatcatgttcttctgtatctagcaaataccaggtattattattatcgataataagaggtttttttatttttctggcaataagttgattatctaaaatcactgggtcgtcatcgcttagctttccaccaaccaatttaacgcgttgtatttttggggtaataatgttttttaaagattcctttttcttttctcgatcagggaacatctctccttgtcctgtgcttagccataacaatgaagcattggtttcaaggttgcattgaataacccaatcggctggaaagctgtcccttaaataacggttcgccattgtgcttttagacacacctaaatggtcgctcaatgcttgacgcgatttaaacccatatgcactaacaaggcgttcgatagcttgttttcctccactatctgcacccatttttatctcagttatgttttttttcattgaaagtacagtttggtgagtttgccatctccacaaagccctctgattaagagctatagtgatcccaaataaatttattagatccgataggggatattgcatcatgggcatataaatttcaatctatatactttgtgaaactatatcatctaaataaagagaaaaaatcttctaatcgataaaataagaaaaacttattaattacaatggattgtgattggaaagaaacctttttaaccattaattattatttcaataaaaacaataattaatatattaacactatcaaatatagttctcaaaaaagatgaaaaaccactttaaatttttctaatcaaagtgtactgttcttatatacagttatgttatgcggaggtaagtttgtcagtggactttcttatggaatcagtaatagcgcaacgtattaattttatagccagaatggcaacgagctgtgaatgtaatcatgctgaagataaagaacttgctttagtttggattgctgagttgtcgacaccacttgcagaacaacttattaaccaccacgaaacgcttgaagaataaatgcggcagataaatgtgggaattctgtatgataaataatctaaagtttctaagttgataatgattgcattggaaaatgagctgagaaatagactttgcctatgaactcagcaaattttggaagatatgattaattataaattagccactgaaaagtggcttcttgcttctcatttgtactgtttccttaacaatattgtttcattggttctctcccactattcagcgcaccataacactttaacttaacaatattgactaaattagaggggggtatacctaatgaaaataattgcacagcagaatgatactgttgatgctttatgctggcgtcattatggtcggactcaaggcatgacagaacaagtactattagttaacccaggtttggctgaatatggtgtaattctgccacatggtacagaagttgagatgccggaaattatgacagctacaacgaaacctattttgcaactatgggattaaagatatccatactaatttgatggttttaaacagagttatcactctatacccaatggatttcaagatgcatcgcgacggcaagggagcgaatccccgggagcatagataacgatgtgaccggggtgagtgagtgcagccaacaaagaagcaacttgaaagatgacaggtatatatcaggaaattaaacttatctattttggctagataaataaacagttgaactggaacgttatacttaatatatagtcaagcagcgaaaatttgaattttttgaactattagagtcaaactttaacaaaagaattacctagtaacatagattacataaaggcccttctcgattacgggaggggctttttaatttatattgttatcttttcccttttcaagaaacttgttttgtctttcttacaattcctctttgatgttggcaactgtctttgctggcattctttcatacataaacccacaaccaccaaatggcatttttccaaacatggatacacaactaacagaacttttgcgcttattgcgtaatctgatcagaactggtgttgttaccgaggtagataccaaccggggagtgtgccggattgcaacaggcaatctcgaaactgactggcggccttggttaacaatgcgagcaggtaattcccgaacttggtgggctcccagccgtggtgagcaagttttgctgttatctgttggtggtgaattgaccacctcctttgtattgccagctatttattctaatcaatttccggagccatcgacttttgaccatattgattttcctgatagtggattaccagccatctattctaatcaatctgcggcaccatcgggtcgttctgaacaagctgttcatattgtttttcctgatggggcaagaatggaatatgagccgaaatttggagccttaaaggtaacaggtattaagactgctaaggtacaggcttcatattctatagatcttgaagcgacgaatataaaactaaaagcaaacaacgaaataaaactagagtcatataacgagattaaattggagtcatacaacgagattgggctggatgcaaaaaacaaaattgacttgaaagcactcaacaagattgggctggatgcaaaaaaagagctcgaactgaaatcacatgaagtcaagtgtgaagcagaagaaaaaatcgaattgaaggcatcagaactgacgttgaaaggtaacacgaaactggaaggtaatgtcgagaacacaggcggaaaactcagttctaatggtgtaaccctacattcgcaccaacacaccggtgtcatggcaggcggtgcaacaacaggaggcccagtataatgatgtaccttggaatgaatcgacaaaccggtcgtagcctgacggatttggatcatgtacgccagtctgtcagcgacatcttactaacccccgttggtagtcgtttggaacgtcgtacttatggctccctgctacccgaattaattgactggccacagaacgcggctctacgcctgcaaatgatggcagccacctatacagctatcagccgctgggaaccgagaattaatctgacagctatcaccataaatacccaacaagacggcaaaatgacagtagatatctctggtcattatcagctgtcccctggggggttttctctatctatccctgtgaggtaaaacaatgccgaccattgatctaagccagttgccgccacctgatgtagtcgagccactggattatgaaagcctgttggctgaacgtaaagccaaattaatatctctttatcctgaagagcaacgggatgctattacacgaacattggaattggaatccgaacctctggttaagttacttgaggaaaacgcgtaccgggagttgatattgcgccagcgggttaatgaagccgctcgtgcagtaatgttggcctatgcaaccaatagagatttagaccagttaggagcgaactataacgttactcgggcagttatggagcctgatagtaccttccgtgatcgtatccaaagagccttcgaagggctaagtgttgcagggccgataggtgcgtatgaatatcatgcccttaaagttaatgaaagtattcatgctaatagaaatgaatacaaaggcgaatatcaaactgttgcagatgtttccgtcgtcagcccatcaccagccaatgtgacggtgactgttttgtcgcggaaatggaaatgggaaaaagataaagaagacgaagaggataaagagcatagcggtgtagcttcacaagagttattggataaagtgattgcggcacttaatgacgaaaacgtcagaccggttgctgatcgggtaaaagtacagtcagccaacatagtggaatatcaaattgatgctgtgctttatctctatccgacacctgaatctgaacctatccgtaaactggctcaacaaaatatggataagtacgtgctagatcaacataagttggggagagatattcggttatctgccatttatgctgccctgcatgtcgcaggagtacaacaggtagaactgagagccccgacgaaggacataattctgtgtaaagatcaggctccttattgtaccggtgcaaaactggaaatagggaaaacacaaactgatgattgttccaagccaaatccaggtttgatagtgggaggttctgatgaatgaccgcctgttaccaacaggttctacggttttggaattggctgctgctaaggcatgttcgcaattgcagaatattccagtaccacttcgccaactctggaatcctgatatttgccctgaggaattactaccctatctggcgtgggcgtggtcggttgatcgttgggacgaaaactggcctgtaagcactaagcgggacgtaataaaaaattcgctatttctgcacaaacataagggaaccattggtgctgtccgtcgtgtggtagaaccgcttggctatctcattcaaataaaggaatggtggctgaacaacgaaacaccgggcacattccggttggcgataggggtacaggaaaatgggatcaccgaagaaacttttttagagctggaacggctaatttctgatgccaagcctgtaagccgtcatttgataggtttgtcaatcaacctggatgttaagggcgagttttattgcgctgcgacgagttatagtggagatgacctcactgtttaccaatatctccctgacgtcatcacaactagcgacaatgctcctttaggagctgcaattcatttgatcgagacagatacattgagggtttcaccatgaaatactttgcaattttaactaacctaggcgcggcgaaactggcgaacgctgctgctttggggacaaaagtcgatattactcacatggctgttggtgacggtggcggtaaattaccagatcctgacgtcaatcagacaaaattaattaatgaaaagcgtcgtgctgcaattaatacattaagtgtcgacccggtaaacacaaaccaaattattgccgaacaaattatccctgaaggtgagggtggttggtggatgcgtgaaattggtttgtttgatggtgaaggtaacttgattgcagtagcaaactgcccggaaacctataaaccacaattacaggaaggttcgggtagaacacaaactatcagaatgatcttgattgtcagcaatacggattcggtaacgctgaaaatcgatccctctgtcgttctggcgactcgtgattatgtagatagctctatccagaaacatgaaaaaagccgtaatcacccagatgccacattgacagagaaaggttttacaaaacttaatagtgccattaacagtaatgatgaaactacagcagcaacacccaaagcggtaaaagcagcttatgataatgctaatagtaaattggcaaaaaaccaaaatggcgcggatatcctagataaaaatgcttttgtgaaaaaccttggtttattggaaaagctaattccgataggtgtaccacttccttggccgacggcaacactgccggatgggtggttacaatgcaatggtgcggcctttgataaagcgaaatttccggaattagccaaggcttatcctggtggtaatttgcccgatttgcgcggggaatttattcgcggttgggatgacaaacgtggcgttgatccagaccgtacattattggtatggcaagaagggtcttatttactacaggaaactcaacaagctgctgataatgttgttaacttctcagttaatgagcgtacgaaattacaatgggatactccccaaaataaagatattccattaagagctagagcttctggaggttcagcaacaacctggactaccaatgcagcttatataggggtatcaaggccacgtaacgtagcgtttaactatattgtaagggcagcataatgctcatgtctgtacttgaagagatcccgggaggaataccgactgacataccaccaaatggttgggtgaaatgtaatggggcaatctttgataagtctttatatcccaaattagcggaaacttatcccagtggtagattacctgatttacgtggtgaatttatccggggctgggatgatggacgtggggtggatgtcggtcgatatctcctatcctttcaattggcagatattgctccacatagtcacagaattgaacggatgtggtccaactcaaatggtggaactgagaaggtgggtacaccaagctatattctcaatagtgtctaccaaaacgttaactacggtattgatcctcgcggactaggcatcgctatgggaatgggagctggtggtttcggttatatggataatgcgattgctgcttcaacaggaatagaaacacgcccacgaagcgtggcatttaattacattgtgaggattgcctgatgaataaggctgtactggataaaaataatattgctatcagtaccggaagtatcgttgtgtttaattacgatgcgattacgctggaatatttaaacagttctgatgagtatcttcccgttggtgtcggtcttcctgctaattcttgcacagacgtgccacctgataccgaagagggatatatcgcctgccgttcatctgatttaaccgattggcaaattgtaccagattatcgaggaaaaatagcttacgacacccaaactggggaacagaaggaaatcattaaaccgggcgaattaccagaaacactgacgtgcaaacaaccaaacactgattttgataagtgggatggtgaaaaatgggtaacggacattgaagctcaaaaaaacagtcagattgaacaggcagaacaacaccgtgtcactcttcgccaacaggctgatgaagtcatgactttattacaatatgctattgagactgagatggcctctgacacagaaaaagcattattgcttgcctggaagaaatatgtggtattactgagccgtgttgatacttcaatggtttcagatgttgattggccacaaataccaaaataataaaattatcaagaccgggcattatcctgtccccggtcttttttctgtgatgacaggctatgttagcctgtcgatttccgatgcttttgaagtatcaacccggtttagtatggctaggtattttttccattccaataagacctggcacattaggtaaatacttattgattaacctaaagagtcagagtagaaaaaggcctgcggtttgtgaacggcgggcctatattatttatactggttgtgcgggccactcaatatctggtgctatggtgggatcaatgcggtttgcttgcattcggtattttttccaggctttgagtcgctctatctcttccagagttgcttcttctagctcaacggtatcctgtaagggagcaatagtattgctggcaagggctaacaattcttctttacgtctttctgcttgagcaactaactcgccctttgtgtacttacgcggaacaatagcgccatttatatattgccattggcctgaaatatcacaagaatcaagcagattacttacttcagccacactcattccctctggattaaaagctgatacatctcctgatatagaacggattacattattaaaatcatacattactttgattgtatcaggattaaagcttttctggcattcataccagtcttgaccgtcttctgatttcaaataaatgacattaaaatcttcaatgatttttctggcttgttctgagtcaggtgtatattgggaaaaatttttaatgttttgcatatattaatcaccttactaaatattggatatattcatccatatgccgttaactttcttctgtatcggcctacggtttacggtgtcaactagctcatttctgtttccatttattacagcagtaatggcatacccacttgcgtttgtatctccagaacttttctgtacttgcgcgctctctttggcaccaaaacgaatatcttgaatataacgcgtgtctgattctgattttgtataagcgccaataatcgcagcggttggtctatatccttcatgatagacttgataccctctaacccgaagattatcagatttaaggctcatccattcattagttggccctccagaaagggcatgctgccatttgaaatattcgttaccattatcccctgttttaaaccacatataggagtctgcatcaccatctccggtgtttttaaaaccgatagaggcaaagtcggtgtttctgttccaactcagcatagaatcagtagtaatagttatgtcacctgttacattgccaccgctgcgttgcaacgcgtctgcggctttagtaacggtttctatcaaaccaaggtttttaaaagctcgccaatccgtgataatttcgataataatagtctcataatggtattaggcagggttacatatggcgaagattggctatattcgggtgtcaataaatgaccagaactgtggtttacagagaaatgcgttgatgtgtataaattatcatctatttttgtagggaaaatctgtgaaaaaataatcaatgaacagaactaaaagttcacgacagaagaaacagatattgatttatagaggtttccttttccactttctataaagtacagatagttgaataattagaaaaaataataaattaagcaacctgatttgtaccatctcccacacatttcccatcgaatgatttaataattcggatacttcaacatagcgggacaccttaacaggagaaccgctaatatggcacaagattatcatcacggcgtccgtgtacaggaaattaacgagggcacgcgtaccatcactacagttagcaccgctattgttggtatggtctgtactggtcctgaagcagacgaaaaaacttttccactaaacactccggtcttgattactgatgtttcactcgccattggcaaagctggtaaaaccggtacattgcctcaggcacttaaagctatttcagaccagtctaaacccgttactgttgttgtccgtgtagcacaaggtgaaacggaaggtgataccaccaccaatatcattggtactacaactagtgaaggtaagaaaaccggtatacaggcactgttggcagcacaaagccaattaggtgtgaagcctcgtattctgggagtccctgggctggatacaaaagctgttgctgttgagttggcgagtatcgcgcagaaactgagagcaatggcttatatcagtgcctatggcagtaagactatctcagaagttatcgaatatcgcaaaaacttcagtcaacgagaactgatgttgatttggcctgatttcctgagttgggatacggtttctaataaagaaactatcgcctacgcgactgctcgtgcattgggtttgcgtgcaaaaattgatgaagaaacaggttggcacaaaacactgtccaacatcggtgtcaatggtgtgaccggtctttcagcagacgtcttctgggatcttcaagatccagcaacagactcaggcctgctaaaccaaaatggtatcacgacacttatccgtaagaacggtttccgtttctggggttcccgtacttgcgctgatgacccattgttccagttcgaaagttacactcgtactgcccaagtattagctgacactatggcggaagcacatatgtgggcaatcgataaaccactgactccttcactggtacgagacattatcgaaggtatcaatgctaagttccgcgaactgaaatctgggggttacattattgacggtcagtgttggtatgacgaaaacgccaatgataaagacaccttgaaagcgggcaaattgaccctcgattacgactatacacctgtaccaccactggaaaacatgatgttacgccagcgtattacagatcgttacctgatggatttcgcgaaaagcataaacggctaaggggacacagatggcattacctcgcaaacttaaattcctgaacttgtttaatgatggcaatagttatcagggaatcgtggaagaaattactctgcctaagctgagtcgtaaactggaaacctatcgtggcggtggtatgaacggtagcgcaaccgtggacttaggcttggatgaaggtgcattggacgttgaatttactctgggaggtatggaagctcaacattatcggcaatggggtctgaccaaagctgatggcgtaatgttgcgctttgcgggctcctgccagcgcgatgataccagcgatgtgattgctgttgaaatcgtgatgcgtggccgtttccatgagtttgaccacggtgcttataagcagggagataatactcagaccaaaatcagcgctaaaaacacctatttcaaattgacatgggatggtgaagttctgatcgaagtggataccgttaacatggttgaagtcgttaatggtgaggatcgcttggcagatcaccgtcgcgctatgggtctttaatctaatcggataaacaaggttgaaccatgacagaaacactaattactcaaaacgacgagcagcgcacaatcgtattagaagaaccgcttgcacgtggtagtagcaacatcactgaagtggtggtgcgcaaaccgaacagtggcgcgctgcgtggtgctcggctacaggctttgctggagatggatgtggattcaatgatattggttttgccacgtgttaccacaccagcgctcactaaaagcgacctgttgtcaatgacacccggcgatctgattaatctcagtgttgaggtggtcaattttttgttaccgaagtcggcgaagtccggtttccagaccgactaaccgtagatgaattggtggcagatattgccaccgttttccactggtctccggcagtgacagatgaaatgtcactaccggaattactggactggcgacatcgggccatcttacgaagtggtgcagaaaatgagtaatacacagtcacagcttaaattggtaatacagtccgttaataagctgaccagcgccttgaaatctgcccagcgaaacaataaaaggttggcagattctctccggcaaaatcgtgatgaatttaagcgattaaatcagacttatgaagcaattaaatcttattctgctcctgaatatgcgcaggaaactgcgcataccagtgacaaaaaggaagaaaatcgcggtgaaggtcgttatagcaaaatcaaagagcttcgtgaccgcgttagtcaatatggtgctagtgcaaaatcagccggtagtaagatactgacaaccagtaaaaactttctgatgcccggttatgatcttaatgttcaaatgtctaaaattcaggcacaaaccaatattgaaaaaaattctcctgaatacgccatgttgcttaaccaaagtcgtgagttgagcaaaagtacagggattccggccagtcagattgcacagggacagagcctgtatgcctccaaggggtattctcctgaccagataaagaatgtgatgcctggtgcggtattaatgtctcaggcaagcggtacagatttcgccaatgtggttgatattagtactaatgtactggaagggtttaaattacaatccgaagagatggggcatgttagtgatgttttgacggcaacgcttattggctcaaaaacaacgttggcgggattgggtgacaccatgaaatctgtcgctccagcggccacttctttggggattgatattgaaaccgttgcggctgctacaagaaagttaagtgatgccaatattaagggaagtgaagctggagaggctttaagcaatgtactaagtcggttggctgaaccgcctaaagctgctgctgccgtattgaaacaactagatattaaaactcgtgatgctaaaggtaatttacggcaattacctgatattctcgttgaactagatgataaaacccgttcaatgagcggtaaacaacgtacgagttatttcaccgcaattggtggtgaaaatgctgctcctgctttggatgtattggtaaatcaggcagggcagggaggattgcaaacttttatcgctgaactaaaacgtgttcaaggcgaatcccaaaaagttgcatctgtagtgacgaataatctcaccggtgatatccaaaaactcaatgccgcttggagtaatctgggcgttcagatgttttctggcgtagaaggtcctgcaagagaagtcactcagcaagtaacaaatgtagtcaataaagtcagtgaatggatggaagccaacccacgcttggctgcaacgcttgcgactattacggtggtggtcggaggcatattaactgtgtttggcgcattggcacaggcgatcgcttcgatattgcttccattagctgtagcgaaatatagtcttactttctttggtagtactggtgtgagggcgctcggattagtcgggaatgctctgaaaatgttgggtagcaccatgatgatcgttggtcgtttgatgatggctaacccaatcctcgccattattggtgtcattgctatggctgctgtttatatttggcaaaactgggaaacattggggccgaaaatttctcagctttgggaaaatattaaaattagcctaagtgagaaatgggaatccattaaacagagtgttctgcaaacctgggaaagtattaaaactaatatcagtaatgcttgggaattagttaagcagaacacgttggatatctgggagaatattaaaatatcgatttcggataaatggaatgaaattattactgacgtaatgaatctgcccagtaaatttaaagaggttggcacagcgatagttaacagtttattggaggggattaatgaaaaatgggaagccctgaaaaataaactgacttcattgtctgagtatctccctgactggatgcggtcaaaggaagatatttcaaaagacgccagtaataatgtgagtcctaatgttagttcggttctgcccaagcatgacaaagggggcattattccggctggccgatttggtattgtgggtgaatatggaccagagattgtcactggccctgtcaatgttattagccgacgacagactgccaaacttgctgccgctgcggcattttctttgagcgtaatggcaccttctgccgcagccagaaccgcaccattgcatgttcagagcttaccggttcatgcttatcctcagattcaggaaaagaaagcagacaaacggcagatggtagagtatcgcagtgaatcaccggtctatcatataaatatctatggtgcaccggggcaatctgcgcaggatattgcagcagcggttaggcgcgaattggatgatcgggaacgtaaacagcaggcgcgtttacgcagttcattctctgatagaggagaattctaattatgatggctgcactgggtttatttgtttttatgttgaagaccacaccataccagagtatgcaacatcagcagtcatggcggcatgcttttaacagccgtatcgggatacggcctgcttggcaatttctggggccgggtaacgacacaatgacactttccggttcgttatatccagaaattaccggtggtcgtttatcattgacggtattacaagtgatggctgatagcggtaaagcttggtcctttatagatggcagtggcacggtttacggtatgtttgtcattgagagtattgaccagacgaaaactgaatttatgtcgaatggttctgcccgcaaaattgatttcacattgacattacggcgagtggatagttctctaggtgaaatgttcggtgatcttcaggaacaattctctatgcttacagacaatttgtcagatagagtcagagaggtattgtcatgacatctgaatttggcagaggttccgaaaaaggcagtgcaccggcatttcttttggaaattgacaataaagatatcagcgggcgcattcaatcgcgcctgatgtcactcacaatgaccgataatcgtggctttgaagctgaccagcttgatattgaactggatgatgcagatggaagtttggtgctaccttccagaggtaatgtaatttcattggcgttaggatggcgtgatcagccactgattagtaaagggcgttttactgtggatgaaattggtcacagtggagcgccggataaattaacaattcgtgcccgtagtgctgatttccgtgaatctctcaatatgagacgtgaagagtcttatcataagaaaacgataggtgatattgtccatactatcgcggcgagaaataaccttaccgccgatttgcatcaggatattgcgaagatatttattaaccatattgatcagacgaatgagtcagatggtagttttcttacgcgcttggcaaggcaggaaggagcaattgcttcagtaaaaaatggtaagttgatatttattcggcaaggacagaataaaacagccagtggtgcggttatccctggattagtgattacacgtcggtctggtgacaatcataattttacgctgtccgatcgtgaggcttataccggcgtggtagcaaactggttggatgtccgtaaaccggagaaaaaacataccttaaccgttgagcgaaaaagtcagaaaaatgctgataaattaacctcttatttagtaggtagcaaagataacgtattggaactttcccgtatttatgctgatgaagccagcgctaaacgtgctgccaaagttgcttgggagaaaatacaacgtggggcagcgacgttttcgattcaactggctcaggggcgtgcagatctctaccctgaaataccaatcaaagttaccggctttaaaccagaaatagatgctgccgaatggacattaacgacagtcactcacacggtgaatggatctgatggtggttttacaacagcactgactctggaattaaaaattgatgatctcgatatgaaataaatgttcttcaaatgagatctcattgctatattgttcacattatgagagttcatgttttagttaagggtaagaaaatatgatcaagtgtcctctttgtggtaaagcggctcatgcacgcagcagctttgagcattcctgccatacaaaagaacgttataatcaatgtcaaaacatcaattgtggtgcaactttcgtcagccatgaaacgtttgtccgctttatttccaaacctggtgaagtaataagtgttaagccgcatcccaaagaaaaaactaaaactcaattgaatgtgacttgaaaattaaaagttaattgtaaatatttgccaccaaaaaaacaggtggctttttactcggatgctcgatttgttatatatctttctgctagctacgttgctaaatatcttgtgaattagttaataaattcacttgcgtccctagtcatattttgtcagctttggtgtaatcagaatcactgatcaacacttaccaaagtaggacaataatgatgaaaaatgtgggctttatcggctggcgcggtatggtcggctcagtattaatgcagcgtatgattgaagagcaggattttgatgttatttgtccggtattcttcacgacatcacaacacggacagccagcacctgattttactggtcagcaaggtacgttacagaatgctttcgatatcgaagctcttggtgctttggatattattattagctgtcaagggggagattatactaatgagatttatccaaagttaagggcaacgggttggcagggatattggattgatgcagcgtcagcgctgcgtatgaatgatgattccatcattattttagatccagttaaccatacgcatattcagcaaggtcttaataaaggcataaaaacttttgttggtggtaattgtaccgttagcctaatgttgatgtctttagggggcttatttgctaatgatttggttgaatgggcttctgttgcaacttatcaggcagcttctggtgcaggtgctcgtcatatgcgggaactactggttcagatgggatctctacatactcaggtagcaaaagagttgcaagatccggcatcggctattctggatattgaaagaaaagtaacggatttcacccgtagcggagttatgtcaactgagaaatttagcgtgccgttggcaggtagtttgattccgtggattgataaacagcttgataatggccaaagccgtgaagagtggaaaggtcaggcagaaaccaacaagatcctgaataccggtaataacatcattactgtggatggtttgtgtgtacgtattggggcgctgcgttgccacagccaggcatttactttgaaattgaaaaaagatatttcgattcctgaaattgagcaattactggctgcgcataacgactgggttcgtgttattccaaatgatcgcgaattgagtatgcgtgaattaactccggcggcggtaacgggaactttggatactcctgtagggcgtttacgtaagctgaatatgggaccagagtatttatctgcttttactgtcggtgaccaattgctgtggggagcagcagagcctctgcgtcgtatgctacgtatcttgatttaataattttaatctatctatttatgtgaaaatccactcgttattcgagtggatttatctatatagctctgttcattgtttctttattggtttttttttgttatgttacataagttatgttaatggttttgtgatttgaaaataagaaatcggttttataaggggagatatgaagcaagataacctactggatttaaaggtaagggaattaagagagttagcgaaaactttatcttttcgctatctaactcatagtaaaataagaatggattttaattcaaaaataaatctttttgtagaggatatattaggtcaggttcgtattcactgtttatcttcaaatggtgcaattgagattattcagtttgaaatagatcacttaaaagaacaagctttctgtttgacagcaaacagagtaaagcaatatgcaataattgaaagggaaaaagagaaatcaagttatactaatcttatattaaaacagatcgggtttgttggtggcggcactcaaattcttgcaggttatacagtctgtaaagcttctttagggttagcatgtgcctcattcggtgcgccattaatggcccatgggtataataatgttgttgaaaatggatattatctactgtacagagaaaatattaatggtggtgtcagagaaggatataggtatgttgctaataaaattggtttaagtgataaagatgcagatattacttatgcaactgttgatttagtgctttcaggttatggcatttttagaaaagttttgaagccaagagagaaatcttggagtttatttagaaatattaatagtgattttatcagaggatggagagaaatgggagttgtgagcttaactacagaaggtattgttgatgtttctacagttttgagtatttatcagctagaaaaggaaaaataatgatggattatattgatgttacaatttccactcaatctacttggcaggatatttttctgtactattctttatcattgattgttttgttttttcttttttttatgaaaattttcatagaaaaaaaaagaagttatatactctctgtttttggtttctttataatagtaatgtttggttcaattcaattgtttattgttaaatatgatggttatcatgaaattatatcaatgtttattaatttaaatagtgaagtaattagagtgggtagtgtgatattttctgttttatatgcgtgcatgttaccaagaaaatatggggattaatttaaaattaaatggttgtaaaattaacttatcaatgggtagagtaagttttaagttaatgtttaattattgaaaacatagtatgctatattaaataaggtttcataattccgatatatatgattttcttcaactaattgttatacatagaattatatgttatgtaacgtttagtactattttggaaagttatttagtgttcaattgattttgacaggatatgagtacaatatacctaattttattaattttaaaaatgaaagtataaaggttggtggttttatattttccttattgtatattattttaatgccaagaagatattctaggtgattttttcaaagatataataaaatgtcagaattaatttagttactggactaattgttgataacgctacagctctgagtatttgtcagctagaaaaggaaaaataatgatggactatatagatgttacaatttccattcaatctaattggcaggatatttttctgtactattctttatcattgattattttattttttcttttttttatgaaaatttccatagaaaaaaaagaagttatgtactctctgtttttggtttctttataatagtaatgtttggttcaattcaattgtttattgttaaatatgatggttaccatgatattatatcaatgtttattaatttaaatagtgaagtaatcagaataggtagtgtgatattttctgttttatatgctttggctctaccaagaaaattcgttaatgaaaaaaggcgttaaattaaaacgccttgttttgattatttaataaattctgtcatcccaaatactataaccgccagtacctgcgataaggtgattccaggtaatattggtatattttaacgaaatactttcctgtggtggaagctcattatgattcaatgaatgtggatgtaagacacttatttcagtgattgtggcaccagtgatctttatattgtaataacgttcttgagcaccatttgaattagttcggtaaaaatcaatagagcattcaagagactcattctcagaaatagcaacaccgagtaatggtgatgatttgtcgataggtttttggataataatgggttgatgatcgacattttgagtccgtgttatcgcatggcttaagctataaactaatatctgatcaaagtggtttgcttgatatttattaccaatggaatcaacagaagaacatccagccgatattaatccttgtttttttccctttattgtcatgtaaatcatgtcagccatattatacccttagattatatttaagtgatgttttacagaaacattaaataaattacactttattggttataaataacagataaaaaaagcgctcatagagaatcaatatgagcgcttttttaaatttataataatatcaactagatatcaatattagctgctttcagggcattctcttcaataaatgctcgacgaggttcaacagcatcacccatcagagttgtaaacagttggtcagttgcaatggcatcttttactgtcacacgcatcatgcggcgagtttccgggttcatggttgtttcccataactgttcagggttcatttctcccaaacctttataacgctgtatagacaacccacggcgagactctttagtcaaccagtttagcgcttgttcaaaactgctaaccggttggcgtcgttcaccacgttcgatgtacgcgtcttcttcgatcaagttgcgaagcttatcacctagtagagtgatgcggtgatattcaccgccgtggacaaaatcgaagtccaatagataatcagtatcaacaccgtgtgtacgaacacacagaaccggttcgtacatttggcgctcacgattttcatggaggcgataactgtagctgctgccgttttgttcactgtcattcaaacgggtgaccagcatttcaatccattcttcaactttcgccttatcagacaatgtttcttcggtcagattcggatgataaattaggctattcaataaacttagcggatacaaacgttccatgcgtttaatgattttttgaacaccattaaattcggtcactaatttttctagcggttcgcctctcagggctggtacgtgctcattggtgtaaagtgaggcaccatctagtgcaatggatagttggtactcatccattgcttcatcatctttaatatattgttcttgtttgccttttttgactttatacagtggcggctgagcaataaacacatgaccacgttcaatgatttctggcatttgacgatagaagaaagtcagcaagagagtacgaatatgagaaccatcgacatccgcatccgtcatgataataatgctgtgataacgcagcttatctgggttatattcgtcacggccaataccgcagcccaatgcggtgatcagggttgccacttcctgagaagagagcattttatcgaaacgcgctttttcgacattcaggattttgccttttagcggcaaaattgcctgatttttgcggttacggccctgttttgccgaaccacccgcagagtccccttccactaagtagagttcagagagtgccggatcacgttcctggcaatccgccagtttgcctggcaacccagccagatcaagagcgcctttacgacgtgtcatttcacgcgctttacgggctgcttcacgagcacgggcagcatcaataattttactgacgacagttttagcgtcgtttggattttctaataagtattccactagcttctcattcatcagcgtttcaaccgcagttttcacttcggaagagaccagtttgtctttagtctgagaagagaattttggatcaggtactttaacggaaataacagcaactaaaccttcacgagcatcatcaccagtggcgctgactttggatttcttgttgtacccttctttatccatgtaactattaagagtacgtgtcatcgcagtacggaagccaactaagtgagttcccccatcgcgttgtgggatattattggtaaagcaataaatattttcctggaaaccatcgttccattgcattgagatttcaacaccgatgccatctttttctgtagaaaaatagaaaacatttggatgaatgggagttttgtttttatttaggaactcaacaaacgctttaattccaccttcataatggaagtggtcttctatattagtgcgcttatcaatgaggcggatggatacaccggaattcaggaaggatagttcacgcaggcgtttagccagaatgtcgtgctggaattctgtgttatcacggaaagtatccatgctcggccagaaacggacacgggtacctgtctgttcagtttctccaacgactttcagtgggctttgtggcacaccaaggtgataagtctgttcatgaactttgccgtcacggcggataaccaattccagcttttcagacaaggcgttaacaacagaaacccctacgccgtgcagaccgccggagactttataagagttatcatcgaatttaccccccgcatgcagcaccgtcataataacttcggctgctgaaacaccttcttcttcgtgtataccggtaggaataccacggccatcatcctgtacggagactgagttatcagcatggatagtgacgataacttcactacagtggcctgcgagggcttcgtcgatagcgttgtcgacaacctcgaagaccatgtggtgtaagccggtaccatcgtctgtatcaccgatatacatgcccggacgtttacgcaccgcatccagcccttttaataccttgatacttgaggagtcatatgtattcgacatcaacgtttctcgctcatttttaatcctgtggttgaacctctattttgccattttccacgcgaaacatcttgctatttccatcaagcatgtctgttatttggtcaggatttatcgcgctgacaaatacctgagcttgcgtggattttagacgagcggccagcaactgacggcggctggtatccagttcggaggcaaaatcatcaagcagatacagacattgttgtccgctctgtcgggtgaaatattcaccctgtgctagccgcagtgcgcacatcagtaactttaattgaccgcgggatagcatatcttctactggcgttccttctgcacgaatgcgcagatctgccttatgtgggccggaagctgtataggttaacgttctgtcacgctcaaattggcgctccagtaattcagcataatcactctctttgtcccatccctgttgaaaagagaaacttaatgtaaattcgggtaagaactgcttacaggtattcgtgatatcctgagtgatgtttgtaacatattcaccacgccactgatttatttggttagcgagtggtatcaattcctgatcccaaggccgtatctggctgtagcgggtaacttgccgtagtgctgcattgcgttgtttgagtagccgttttaagtttacccatgcagaaaaaaagcgtggctcattgtgaaagcacccccagtcaataaaagcccgtcgatactttggcccgccatttaacagggtaaacccttctggagtaataagctgcataggtaacatcttagccagttctgcaattttaccgccatcactaccatcaattctgactttactgtcgccattacggtttttactcaggccgatagaccgttcccgctcattctcctgttgccctagccgcccatgcagaacgaactcatcgcagccatgaaggattacccgtcctgcctgaatgctacgaaaagagcgcccgtgacccagcgtataaatcgcttccagtacgctggttttaccgctgccattagagccaaccagaaagttaaatccggtagctagaggcaaatcagcggcggcgatattacgaaaatcgcggataagtaaacgcgtgagagtcatatacctgaaataaaaatccggttacaggcgcattggcatcacgacataagccgcattgtggtttgcacagtcttctatctgaacactagaaatagcatcagtcagtagtaaacggacctcttcacatcttagtgtattgagaacatctagtacgtaactgacattaaagcctatttccatttcagccccttggtagctgacatcgacaatctcttcggcttcttcctgttcagggttatttgctgtgattcttagctggttttcactgaaataaaggcgaactccgcgaaatttctcattagagagaatagctgcacgtgaaaaagcctgtttcagcatatcgcaattagcttccagagttttatctgggttctttggtaatacacgacgataatcagggaaacgtccatccaccaatttagaggtgaaaataaagtcgccaacgtgggcacgaatattgttactaccgatttgtaactgtagcggagtatcaccaccatccagcaatctcatgagttcaataacgcctttacgtggcacgatgactgaatgggaaggcaatttttgaccaattcccatagaacagactgccagacggtgaccatcggttgcaactgtacgtagctcttctccttcggtttcaaacaacataccgttgaggtaatagcggacatcctggtgagccattgagaactgagttgattcaataaggcgcttcagtgtggcctgaggcagtgaaaactccacctcactttgccagtcatcaagatttggaaaatcagatgcgggcaatgtggaaagtgagaagcggctgcgaccagaacgcaccaataggcggtcaccatccagttctacactgatctcggccccgtctggcaaacctcgccagatatcaaagaatttacgtgccggtactgtggttgcacctacttcgtgtggcaatgaaagcgtgactcttgccatcatttccatttctaaatctgtgccggtcagcaacagggagccttctgtaacctgtagtaataaattaccaagaataggcagagtagggcgcccactcagcgggctactgacctgttgcagtggttttaacaattgctcacgttcaatgataaatttcatagcactaggaagacaatgttctgattaagttagaaaaatcctctttgatgtcgtgactttcttcacgcagttgctcgattttacgacaagcatgcagcacagttgtatggtcacgtccaccaaaggcatccccgatttcaggcaagctgtggttggttaactcttttgccagcgccattgccatttgccttggacgggcaacggaacgggagcgccgtttggaaagtaaatcggccaccttaattttataatactcagcgactgttttctgaatattatcaatggtaaccagtttttcttgcaatgctaacagatcacgtaatgcttcacgtacaaaatcaatggtaatcgctcggccagtaaaattggcatttgctattaccctatttaatgccccttcaagctcacggacattagaacgcagacgtttggctataaagaaagcgacttctcctggtaactggatttcgttttcgtctgccttcttcatcaaaatagcgacacgggtttcgagttccggtggttcaattgcaacggttagtccccagccaaaacgggattttaaccgatcttctaccccattgatctcttttgggtagcgatctgatgtcagaataatctgttgattaccttccagtaatgcattgaatgtgtggaagaactcttcttgcgagcgttctttattggcaaaaaactgaatatcatcgatcaataatgcgtcgacagagcggtaatagcgtttgaactcttctattgcattattttgtaatgccttgaccatatcctgaacaaaacgttcagaatgcatatagaccaccttggcatttgccttacgtgccataatactgttacctacggcatgtaatagatgggttttacccaaaccggtaccaccataaagaaatagtgggttataggcaccgccgggattatcagcgacctgtcttgcagcagcacgagcgagttggttggatttaccttcaacaaagttatcaaaagtatgttttgggttaacattagagcgataagagagctcgggttgtaccgcggtgttatcccaactggggcgtactgatgtgttttgtggtgcaggtgcaaccggcgtatgagtaacaaccctttgtggtgggctatcgttttgggaaacgggtttattgccaacttcaaaacgtaataatggtacttctgctccacagaagtcattcaacaatccattgatattgttgatatacttctctcttacccagtccagaacgaaccgatttggggcataaagtgccagcgtgttaccacttagctctgcctgaagggggcgtatccacatactgaattctgtggcaggtaattcatcctgcaatcgggcaagacattgctgccaaagcgaaagtgacacggtggactcccctaaaacaaggccaattaacaattaaagaaatcggagtggttagctcattatgttgggtacaaaacaacgactcctctaaggtgaggaaggatcaattgtcatgtgtatggcgatttttaatgtcatcgctcccccatgatccgaggataagatccaaatcatggcttgggatcatagcgcaaaagacgatatagatcttcattcttttacacagtttaagcgctttttatccacaggataaaattgtgtgtgaaataaagagctgtaaaggggttgtagtggaattatggaggatgccaaatgcagatcgagaataagccggtattcaaaataaaatcggaccaaggatcataacaaaaaacgaagatctgccagtgatcgttgcgctttgttcagtagtccgtataatattgcaccctatgtgcgtatcagagtttttaccgataatgtttggtgaagggtctggtgtacgcatgggcagagtgttggtaaacatccgactcagtagaaaagccggccgactttgtgttatgtaaattgactcagagctgtacattttattacaatcccgcttcttttatattgatgttgcgattgaggcatcggtgtctatttctcactggctgccaacgcatttactgaatcagtaataatcttaagttaggtagaaatcgctatgaaacgcactttccaaccatccgtactgaagcgtaaccgttctcatggtttccgcgctcgtatggctaccaaaaatggtcgtcaggttctggctcgccgtcgtgcaaaaggccgtactcgtctgaccgtttctaagtaataaagctaaccatctagtggttaagctcgcttttccgagggagttacgcttgttaactcccaagcatttcacttatgttttccagcaaccccaacgggcaagttcgccagagattactatccttggtcgcccgaacgagctggggcatccccgtatcggtcttactatagccaagaaaaatgttaaacgtgctcatgagcgtaaccggattaagcggttagcccgtgaaagcttccgtttaaaccaacatgagttgcctcctatggattttgtggtattggttaggaaaggcgttgctgagcttgataaccgtgcgttaacggaggcgttgggtaaattatggcgtcgtcactgtcgtttggctcgcgcttcctgatcgcattaatccggggatatcagttggtaataagcccgctgttggggcctcgttgtcgctttaatcctacatgctctcaatatggcattgaggcattacgcaggtttggggtgataaaaggctgttggttaacggtgaaacgcgttttaaaatgccaccctttacatgaaggtggtgatgatcctgtcccacccgtaaaaaacaacgataacagagaacactaacgatggattcgcaacgtaatcttcttctcatcgctttgctgttcgtttctttcttggtctggcaagcatgggaagcagataaaaatccgcagccaacgacagtacaggccacgcaacaaacggatatgccgagcagtgagaatcaagctgtaccaggcagtggaaaaggtaaacttatcacggttaaaactgatgtgctctctttgaccatcaatactcgtggcggtgatatcgaagaggctgacctgttagcctatcctgataccttgggttcaaaccagcccttcaagttgttggaaacaacacccgctttcacttatcaagcgcaaagcggattgacggggaaagatggtccagataacccgatgaatagtgagcgcccgctgtataccgcagcacaggatagctatgtattggctgatggacaggatgaattgcgtatcccaatgaatttcgtcactaaaaatggcattgtttacgttaaaacatttgtcctgaaacgtggtgaatacgcgattagtgtggattaccgtattcataacacgacagaaaaaccgttacagatgaccttctttggtcagttgaaacagagtgttgaactacccaagcatcgtgatacaggcagcagtaactttgccctgcatacttaccgtggtgcagcctattcttcagatgataccaaatacaaaaaatatagctttagcgatattgaaggtgaatctttatccgtgaccaccaaaggtggctggattgctatgttgcaacaatattttgctactgcttgggttcctgtagctaatgaaaccagcactttttacactgttgcattaggtaaagagatggctgcgattggctataagagtgccccaatctctgttgcggctaacagtgaaaaaacagtctcttctacactgtggattggtccagaaattcaagatgaaatggctgctgtagcacctcatctggatctgtccgtagactatggttggttgtggtttatctctcagccattatttaagctgttgaagttcctgcatggttttattggtaactggggcttctccatcattgttatcacctttattgtgcgtggtatcatgtacccgctgaccaaagcacaatacacgtcaatggcgaaaatgcgtctgttacagcctaaattggcggctatgcgcgagcgtattggtgatgataaacagcgtatgagccaggaaatgatggcattgtacaaagcagagaaagtgaacccactgggtggttgtttgcctctgttgatccagatgccaatcttccttgctttatattacatgttgatgggttctgttgaattgcgtcatgcgccatttgctggctggattcatgacttgtctgcacaagatccttattacatcctgccgttgctgatgggtgtgacaatgttcatcatccagaaaatgtctccgacaacaattactgatccgatgcaacagaagattatgacctatatgcccgtcatatttaccatattcttcctgtggttcccatcaggtctggttctgtactatatcgtcagtaacctggtgacaattatccagcagcaattaatttatcgtgggctggaaaaacgcggcttgcatagtcgtgagaaaaagccagcgaaataaaacatacaccctatggatttcaagatggatcgcggcggcaagggagcgaatccccgggagcatagaaaactatgtgaccggggtgagtgagtgcagccaacaaagaggcaacttgaaagatgacgggtatagcttcagccagaatgaatatatgctggccgttgtaacagaaaaggcggtcattgaccgccttaactatttgagtaaaagaataatttgggcgaaaaagtcaatagagagataactatgaataccacggatacgattgttgctcaggctaccccaccaggacgaggaggggttggtattttgcgtgtttccggcccgaaagccgcacaggtcgctgaggtggtattaggtaaattacccaaaccccgttatgcagattatctgccatttcgtgatgtggatggtcagatacttgatcaggggattgctatttactttccggggccgaattcctttactggagaagatgtactggagcttcaagggcatggtggtccagttattctcgatttgctacttaaacgtattctaacgctgtctggtgtgcgaattgctaacccaggtgagttttctgaacgcgcttttcttaatgacaaactggatttagctcaggcggaagccattgctgacctgatcgatgccagttcggagcaggctgcccgttcagcgatgaactccttacagggcgctttttcgactcaagttcaccagatggtggaagcacttactcacttacgaatctatgtagaagcggctattgattttccagatgaagagattgacttcctttctgatgggaaaatcgaagctaagttggatgaagtgatagttgagcttgagcgagtgcgttctcaggcacgtcagggcagccttttacgtgaagggatgaaagttgttattgctggtcgccctaatgcaggaaagtccagtctacttaatgcattagcaggccgtgaagcggcgattgtgacggatattgctggtacaacccgtgatgtgctgcgtgaacatatccatattgacggtatgccgttgcatattattgataccgccggtttgcgtgaagccagtgacgaagttgagcgtattggtattgagcgtgcttggcaggaaattgagcaggctgatcgtgtactgtttatggtggatagcacgacgacgaacgcggttgaacctgtggaaatctggcctgaatttatggctcgcctgcctaaatcgcttcctatcacagtcgttcgtaataagacagatatgactgatgaagagacaagtattgcagaagtaagtggttactcgctaattcgactttctgcccgtagtggtgaaggaatcgatttattgcgtgatcatctgaaagagacgatgggttttagcagtaataccgaaggtggtttcttggctcgtcgtcgtcatttacaagcattaaataccgcagcggaacatttacaacagggccatgaacaattggtggttgcccgttcaggtgaattgctggcagaagagttgcgtctggcgcagcaggcattgagtgagatcacgggtgaatttacctccgatgatctgctaggaaggattttttcgagtttttgtattgggaagtgaagtggtcatttttaaagtgtaacgcttcaaaacccatcgaaacatatcaaactgttatatataaacttttacatatataacagtgctttcttttttacttcgctttgatccgctttaccaaaactccatcgcgcattgcaaagtcgttttccgattacttttaaaaaaatggtgctgttttaaaagcgccaaatacagtgtggtatacgctgttccaacagctacaacatctgttaccggaacaagattgtttttaaatgatcgtctgccaaatcaaactcaggatctttacctgttaacgctttcgttagtggcataattttggtcctcacacccattcctcggtaatcgacatagccataatcacgcaatacttccataacaatgatatttctgggtgaacgctgtcctgctttcattttttctaccgtcatggagtttggtaacgaacctgggctaattacttcaagccggtcggaataactagatacctcaatttcaacaaaacgtgtccaatcgcggtgcgccagtgcattgaccaatgcttctctaacggcctcaagtggataaaaccaccgtgtctctcgccttaactcttcattcacctgatcagactcttgagaaataaagggactcatagcctcgataaatctctcaataacgccgccatcgactagccgtttatcaccattttcaagatcccagcgcccgaccattgggccatcaatgatgtcatccaatgcagcttggtattccttatcttcaccatgaaataccatgacccgtaaacctgcttgtttgagatagcgtctcgggcttttaccaaataacaccaagccagctattgtgcagcaaacactgcctgcggcttcggttaaaaaacccagtccaagtagccttgcttgccattcatcaggtgttttaggtacatcgggatctcgtaagatgtcctttacataattggttaggcgagcgtcatccaaacaactcatatctgtacgaggcacaggcattacttcggtatgcagcattccacccaattcgaacaatcgcatctgctgctctctagttgctagcctcgatgttgtcccaacacgaatatagatttcctcttttccgctatggagaacgacgtagggcttcgaaatgccgatgggaaaactaatgacagcaaccagtttaccatcatccaatttcacttcttcgtaaaacggcagcatcatcggatgaattttgccctgaaagacattcataacccactcttcaagatcatgcctttgtacgccactaatagtaccgtcatcttccacacccagcagtacccgtcccccttggaagttggccatagcaacaacttctttggctaactgctcaggacgtatatcatctcgcttaaactccacacctgaattttcgccattggcaataatttccaacaattctgtttttaacatcgttctctcccaaggaagtaaagcattcagttaaagccgtacttttcacgacgttgattaaacgcactcttaccaccttccaatatatctgccgctagtttttgcacttcgggcatatcgatcgcaccctgctgttctggccggatcaaccctttgttatcttccacactcagcacaccaatccattccgcgtcgccaaataccggaatattggcgttgtgggttgcgaacaagaactgtcggcttagcttggctctgcgcagctcagcaacgatacgctcagcaataaaggcgttatcaaggttatcctccggctgatcaaggataagaggatcttggttgtccaatagcaacaggtgcaaaatcgccgtacattgttggccggtcgatagttccccaattgggcggaaaacggcctcgcgttcaccgtgagtgatattcagctcaatcgccattgtatcgggaagcagcaactcttctagctcaagcagtttacgcttaggcaaacggcttaacgctcgtacaacggaattagatataccgaaattagaggttaattcagcctcaccttggcgaatagtggcagcaagattagcgggtgtgaactcactctctaaaacccacgctagtctttcctgcccaataccctctaaattgcaatcactcaggaaattcactaattcttggcggttaccttcagaattcagactaaggcgtaccttttgatccaacttgcgagtgagccgtttaaccgaattctgcatggcgctagcacgtgcactggtctgctgatctaactcaagcaatagtttcttccgctgactatagagctcgttgagttgggtttgtcggttttgcaaggcagtttcttttgggcggatctgttcaatttgctttagtaaggtttgatattcagcaccaatctgccgacctgttttaccctgacttgcaggtatgtctttaaacgcattttcaagttgttgttcttccgctcgcaacctttccgacagttgttgctgtagaggaagtaaatcaccagaggctttactggagagctcttcaacccggattaaacattgagttaaagagttctttaacatttccaaaacttgacgcttttgttttaaaagatttgagtgtggtaatccttctaagctggcatcgcttaaaaataccgtatctggcaaactgtcttttaagatgttgatagcttcttttattcgagtaatttcttcattaactctctcattcagttgtttttctttttccagcgttggaatcactttcaacttttcatcaatacccagcgcctggaattgtttagcctgatccaataacttgggtaagcgctcaacttctgcctcaacatctgctttttggctaagcgcacgaataatggtttcacgattatccttaaggctttctagcacttcggttatggccttatcaaactgctcgtgctcactttccaagaatcgtttaataagtaggtttcggctttgttcatcccgagtcatttcataaatttcattctgaccgtacagctcaacgccaggcagtaaatctttggggtgataaggtgaaattctgccgttttcattctccaccactactggctggtttccatatttgcggctcaccgtaaatatgcggccatgcatggttgcagagcgaactcttacttcaaccatacctttttcgagacctaagttattttttacaatagcgtcatgctgagctttcgatgctttaccaaaaggttctaaatcaaaagcatagcgaatacactccagcagggttgatttgcccgtacctctaccaccaatcaccgcgtttaagtgatccgataattcaatatccataccatcaagatagccaccgacaaaacgaacacgttcgatagctgacgcatagttttccgatttgtctgaatttagccgcactctggagccagcatctaaaaaagcttgcttgaaagaagtgaaacagggcttggtcattttaattaaacaagaagcgccatcagctttaatctcttcaggcttcgccacatcagcggcattgatggcagccatttcccgtttgcggcgatagttatcatctttatttaggaaaactttacgataaaagtcgctctctacaccctttaagtcctcaactgaacctgggatctgagcagccaacagccctttatgttgccaaatatgattcatccgccgttttaacacgccatcatcattagtacagtgggccgcgaaaatgaaaccacccttatcgtttacgtaattaataatatctgtggcagatttctgcactggggcttccggctggtttatatccacatctaatgctcccaaatgcatttttatctgatcagctgactctgattcatcaaacaagcaaacgaagtgaattttctcactggaagcaacttcaaagcaggggaacaccacgattccatgttgtgtaaagagatctctgatcttttcaaaaccattcactgacccatgatcagctaggccgatgacttcaattctcatctctagcgcagcatttaacaattgctggttatagtcatcttcagaaagcgcctgttgctgcccccgatattttatgtagcctgaagcatttacctgcaatgcacacttgaaaaaacgagctttagcgtacttattggtctgaatagtcatacttatactccacttatacaggcatattcatcgttcaggtcttggtaatttacatcgataaaattgtcttaaagcagatctgtattaagtcctgcggttttcaaacgctgcgtcaaattgcgcattttactgaattcagtgccaaaactctgggtaagcccaacaccttcacaaaagtctttagctgtaatgttcttcagctcatcggcatacttaatcatttgtagatgtagctcagctgtgtactgattgcgtggcgcattcgctaaaacctgcttgatcctttcgtaaatatcttgttcgtttatcataacctttaccatcgaacatctagataatttagctaaattatataatttatatgcgtacagcaaggaaaactgtagttgcgttggtaaacgttctagactatttgcaaatagatgggggatggtttgctttactgatagcaagctatgagataatgctaccatttagttacaaaatcaaaattcacataagaaattgttttaattatatttttcacattctgtattggcaagtgaatgggtaaaaggcagaagtggaactttttaccggttataacaggtaaaattatatttaccgtctatagcgtgtaaaaattgatttacctgtcatagcgtgtaacaatgaggttaactgttcaaattggttgacctcaatatgaaagtgactaactcgaaacaacttagcgtatatttaaaagatatcaggcttactcaaaaactttctcagggcaaagtggcaagcaaagtgggtattcggcaggacacggtatcaagctttgagctgcacccagattctaccaagctggagaccttctttaagattatgtcggcgttgaatttagaactcgatatccggccaagaaacgtgactaagataaattcgtcagtggaagatgattgcacaacgtcggacccggcgtggaaagaggagtggtaatggcagcactggatgtctacatgaacggttatcgggttggagtattcaccaaagccaatactggcttccaccatttcaaatatgatgagtcctggcttaggttatcgggtagtcgtcccatttcactgtctatgcctctgcgccatcaagcttatcagggggacgaggtatataactttttcgataatctactgccggataatccggaaatcagaagaagaattgttgccaggcacaatgctgaatcaacgcaaccttttgatctgctggctaaagttggccaagatagtgtaggtgctttgcaattggtaccgcaaggtacatccgctaatgatatcaagaggattgaatacaagcccttatccaaggtggaactagagaaagtgctaactggctaccaagctggtgcgccattggggatgatcgaagaagaggaagattttcgtatatccattgctggcgcacaggaaaagacagcgcttttaaatattgatggaaattggtgtttgccattaaatgccacgccgacaacacacatcattaaacttcccattggtaaaattgagagtcattcacattccattgatatgtctgaaagtgtggaaaatgaatatctgtgcatgttgattgccaggatgtttgggctgtctgttcctcactgcttaataatgaaagtgggagagataaaagcattagcggtagaacgatttgatcgcaagtactcatctgacaacagttggataatgcggctgcctcaggaagatttctgccaaaccttgagcgtgccttcggcgaaaaagtatgagagtcatggtggccctgggattcccgagatcatgtcctgcctcttgggttcggttaaagccgagactgaccgttatgaatttatgaagatccaggtattattttggctgttggccgccacagacggccatgcaaaaaacttttcgctgtttattgaggctgatgggcattatcggctaacgcctttttatgacattctttccatgtaccctgtattcggaggcagagggcttcatccccgagatgccaaattggcaatggggctaactgggacgagaggtaggaagtacaacatagagcagatattcccaaggcacttttttcaaacagccaaggtcgctggatttgataaggattcgatggcaagaattcttactgaatatgctgagacggttgataccgttgtcatgaatgtcagagaccagttgccgatagatttccctgttcatatcagtaattcgatattgggagggttacaagccagagcaaagcgcctgaaaattgggtgggattaacattctcatcaacattatctacagcaagcgccatataaatatggcacctactcacattatgggtatatataccctatggatttcgagatgcatcgcgacggcaagggagcggatccccgggagcataggtaactatgtgaccggggtgagtgagtgcagccaacaaagaggcaacttgaaagataacgggtataacttactttttacctgcaacgtctagttgctgataaatatagtgtttataactctccaccagcgccttatcctgacaatcatccaacgctcctcggcagagatgacgcattgtcatatttgctcggtaaaaagatgaagcatccagtttagccctctccataatcatgccgccaaggaatgaaatatccgtcagttcatcagtctgaatagattctccctgttgcaagttatcccgcatagtaaactgggtaatatgacccggatttgaaaatacgccattgtactgatttaggctgatattgggttgatgatcaccgaagtagaggaacatggttggcttttcccgtttagcaacaaactcactgaaatctttaattgccggatcagaagctttgattttctccatatagtgactgaacttacctactgcctgtgaatttttcacatgtccggtaagcctgtaatcatcagcgtgatcttcatcatatgggccatgttcatacatagttagtgagaaaataaagagcggcttatccgtttcctgtgccaaaatttctttcacataacccaacatctcttgggtagaaatagtccacagatttttatcaagactggcgggatatcccaattcttgtggctgaataatgcgatcaacgccgagagtctgataggcatgaccggaatgataagaagatttattaaatggtgtcaaaacaaccgtataataaccattctgtttcatttcacggaacaagctatatttcaggtgatcaacaataaaataaaaaaccgcattcttacgtgagccaaaatcatctgtatttaagcccgtcagagcagaaaattcagataaccaagtaccaccaccgaaagtttgcacccgcattggactttgggcgctgacacccgaatcccgctggaacatataaagatgaggtaagcgggtatcatcaggcagttgatagatatgcggagtcacggtggattcctgtaataacatcaccacgtcaggtttaatcgctgactgcgggacaggcagcacaacattcttagcctgttgcagaaaataatcggatgattgcccaaactgaggcgcatgatatttggcatctttggccgacatcaccatattggtgactgtaccacgtccttttggtagtgaagattcccactgttccctgaacgcatcggcggtagcgctcacttcccatgtacagaacgccgccagaaccaagccgacggtacgccatttgaaaccacggagggaagatgattttttccagctcagcgtcatgttaaaaatcaaccagataaacatcgcgacaacgcctaaaccggccagccaatagtggcgtagtgtttcctgattggcaggatcaaacatcaagtttagatcggagaacatcaactgctctttgtagtaatgaacttttatctgattgaggaacttaaagataataaacagtgttccggtaaaggccgtagaaaacagtaaccgagctgacgcaaaaaatactagaccaaatatcacaccaaacatgccgacagcaatcagtgccgggtaaatatcttcacttttttcaaaaactagtattaaagttgcaatgaacaataatcccagataaacacctgatattattttctttttcatatcgtattgaatccaattaataggtggttcacggttggcaaaatagcacagatcagttcaagacggtgattttgctgaaatcatctatattttaaataaagaaatcatcagaacagcccattatctctaagaatatgtgactcagcctgacgacgagtaaaaccactgcgatcaaaaaattccaatatctgaatagccagtttacgaccgataccgagttgatcacgaaaatcggcagcggtaattgcaccatgatcttgattaaattgacgaatcagatcggcgaactgctgaattcgttggctgcaataataacgatcaggaacaatcgcgataatatgccccaattgagcagcttttttcaacaaactgcgaactgttgcttcttcttcttttaaatcagcagtcaggtcgcgtacccaccaaggatcatctgtaaaatagggcgctattcgttgccacaattttgcctgttcatcactaaaagacaaaccgtgttcaggaagatataaccaacctcgtaattgctttagctgtccatcactgagcaaggcatctatcaaagtgtaaactagcgcttcatccagcgttggcagcgccatccgtttcagacgtgccctgcctaaacccagttgatcaacatgttgctggtgatattcagccaaaacgtgtagtaacttctgctttgctaacttggcattgttctgtgataacaccataccatcggcaataatcatatcttgatcaacgattagcgggtggagagttgcttccgttaactgacgcgcccaagaaaaatggtcgagagagagtgcacctcgtggcaaatggagcgctaaattagctgcatgatctgatgttctggcaagctgagtgagccaatgcaaaaatgctggttggcgcttaccacggcggggggaatttaggtttattacccgcgtaccagccaatgtttttctggcactaatatctcgcaatatcagtcgatcatcctcaaccaaccacaatgggctatcaagcaccaattcagccagcagaggcttatcagaaagcggatttagtaatgaaatccgccccgttatatggctggcagcatgatgaatatgaagtgattgccagtttcgcaagggttcatcagtttctacttccaccaatactttctctacgtgttcaaagggctggcgggaaagtagccaatcaccacgggaaacctgttctttactcacatcaccagcaatattcagtgcaatacgttgcccggcctgagccgtatcggcctgttgattctgagcatgcaagccacgtactctaatttgctgatcccggccggttagccagagggtatctcccaccctgacccggccagccagtgccgttcccgttacgaccaagcctgcgccttttacactgaaagcgcgatctatcgccagacgaaaacgttgatgtaattttttatgctgcttattttgctgatgcaactgcaacagatgctgtctcaaagggacaatactttctttatccgccgcagccgttacaaacagaggggattcactccaaccttgcgttgccagttcatgttcaatttgttggcggacttcaactattcgttgtgtttctacccgatctgctttagtgagcgcaactgtcatggccgggcggccaatcaaacgcagaatagctaaatgttctctcgtttgagccattaccccatcgtcacaggcaaccactaataaaacatgatcaatacctccgatccctgccaacatattagcgaggaatttctcatgtccgggcacatcgataaaaccaaccgaagagccatccggttgcggccaataggcataacctaaatcgatggtcatcccgcgctttttctcttccggcaaatgggctgtattaacgccggtaatcgcttgaataagtgtggttttaccatgatcaacatggcccgcggtggcaaaaatcataatagtttcagaaaattattgtatttcagaaaattacagcaacaatgcctgcaatagcgctttttcatcttcaagacagcgtaaatccagccataaacgtccgccagagatacgaccaagaacgggtttcgctaatccacgccagcaccgggccaaccgctctaacgagctcccctgaccctcaacggcagcgaaagtcaaagcccaacttggcagccgatcaaccggcagtgaaccactgccaatctgtgaataacagggttcatcacgaacaataaattggtcaccgtaatgtgcttgaagctgaggtaatagccgttgtgccatatcatgcatttgttgttgtgagcgggttaacagacgcaacgttggcaactgctggcaaagctgttcggggcgctgatataaccgcaatgtggcttctaaagcggccagcgtcatcttatctgcccgcaaagcacgtttcagcggatgacgctgaatggcttctatccagtgtttcttgccaagaataatgccagcttgtggtccccccagtaatttatcaccagagaaagtgaccagatcgataccctgattcagataatcttgaggcataggttcggctggcaatccatattgcaccatattgatcatggaaccactgcccagatcaattgcagtgggaatttgcgaggctattcccagagtggccaattcacggccagacacttccgcggtaaaaccgtcaatattgtagttactggtatgcactttcatgaggagagcggtctcttcattaatcgcttgccgataatctttcaggtgagtgcggttcgttgtgccgacttcaactaatcggcatcctgcctgaaccatcacatcaggaatacggaatgcgccaccaatttccactagttcgccacgagaaaccaccacttgcttaccggatgctacggttgccaacaataacaacaccgccgctgcattgttattaacaatacaagcatcttccgccccggttaattcacacagtaaatccgccaaagcatggtcacggtgcccacgttcggcgttattgagggaatattccaacgttacaggtgaacgcatcacttgtgttaccgcttcaatcgctgattctgccattaatgctcggccaagattggtgtgaatcaccgtaccactaagattaaacactggctttaaagctaacgcttgtttctgctccagttgctgaccaagtgccgaggcccagttatcacaccaatcaggcagtgcctgatactgcttgatattgattctggcctgctcctgcattcttcttaatgttgcagtgaccaacgtctgtccatattgctccactaatggtgttatttgtggctcacgcaatagacgatcaatggcggggagttggctgtacaacaggcaaggtttatgtgtcatggccttactactactcatttgggaacaaaaacgggttgatgctactgcgggcaaaaccttcctcttccattttggcatcaaggatcagtgacgctaaatcatcagcaacagcttcaacttttggatctttctcctgatagagaattttcaaataactaccgcaatcgccgcaactttccgctttcacggcggcgtgttcactatctaatgaccaataattaagatcgcgggtttgctcgcaattactgcattttacccgtactacatgccattcactttcacacaaactacaatgcagataacgcaacccgttggttgtgccaatctgaacgacacttgagactggcatactgttgcaaaccggacaaaactgacgatgttcaccatattctgccctcgcttttcctgggatttgatttgccatttgtgcccaatagagggaaagtgccgcccagataaaaagtgctttttcagggctgacttgactgaattcatttttcagcagagcatcggccatctgttccagctcctgttctgacgctttttctagattatccagagcggcattaacatgttccgacgcatccggcagtaattctgctatcagagagtgaagtaatttttgccagtgttcagtacgttggaaggttttacaatccagaggcggtttaccttcaatgaccgatttttctaagatatctgctatctccattttcaatggattatcatgcaacgccttttgctgagcttcggcaacttgtgctgaaaagttaagataatcaacgaatgagctctcttttgccaattgttgcaagcgttctgctcgacgctgataaagatttctcagattagcaaaaagcaatggcgggatataatctgctgttttttcattgatgcgatctttgctcaattgttctttaggaacgatgtggatactcattaggttctatcttccttggggctttcagattaataataatctgtaaacttgtttttagcgttcagcatagatcaaaagtggtttctgggctacagagataatacttgaaattatgtggtcggtaataatcaatatattcatgaaatggttgtaaattttttataacccttcattctttgtgtgaattttttgaaagaaaaatattgttaaggcacatcttttgatttaatcttaaaaatccctaaaaagagttaattgtgatttttaacatttctttctatcatattttatatagtctgatagttaattaactcatggttaaaaacatataattaaagtgagtaagcaattgtcaaagatgaatcaaattttcattactgcataaggaaaagatagcaaagctaataattacatttggggctaaaagtgtttcaactatatatggttatttatagtgttactatctatgtattatataataacctcatttaaaaatacagaaagggtaattcaatgctaatcgatctcattacgtcatatagaaaaaccgctgcaatctatacttttgttgatgcgggtttatctattcactttaaaaatggagactatgtagatattaacaaacttgccagtcaatatggtattgattattcgagacttaatcgactatgtgatttcttaattgaaataggcgtattggttagcagtgaccacggagttgcactttctgaggaatgcagtgcacttgctgatcctaatagcgtagaattcttaacagtaaaatatgaaatcaattcagaacattgggattcttggttaatgtatccaaaatccttattggaaaacaatggcaaatcggcatttgaaatggtgcatggaaaatcattttttgagcatttggatagtaataagggattaaaatcagattttgatgctttaatgtcaaaatacacaaataaaataattaaagaattgcttgttatttatgattttgataaacataacagaatattagatctgggtggtggagacggagagcttttgatcagaatcagtgaacaggtcaaaggaaaagattacactgtattggacagatataatgaagtacctatttcagaaggtataaatttcataaaaggagatttttttaagccaattccgacaggttatgatttatatattttaaagaatgttctccataactggcctgataatgatgctatatccattttgaagaactgccgagaagcgatggataataacgcaaccctcctgataataaccttaatgaaaaaaccacaatccttggtagttaaatctgtggatatattaatggatatgctattttcagcgaaacaacgttatttgtctgaattcgaagatatagctaaccaagcggggcttgtcattcgacattataaagatttagatgaaatattttcacttatcgaattaaaggtaaaataaatcattaggggtttaggattatttccaaagatgattatatacccaatagatttcaagatggatcgcgatggcaagggagcgaatccccgggagcatagagaacgatgtgaccggggtgagtgcagccaacaaagaggcaacttgaaagatgacggatatactcatattctatcgttgggaaatatataaaatgtggcatcaagatatttgatgtcacatttttattttatgttaataattaaatatataagcattaaattagaaagcaaatttactctctgacaataaaaacgattaataactatattaaaaaattctattttattttggaaatttatgggaagagttaattgtgatctttgtcatttattttcgtcgaatttaatatagtctgatagttaacaattttgttcctaaaaatgcgttattaaagtaagttgaacaatgggaaaataaggagaatggaatttttattatctcactaagaaaaggtaacaaagctaataattacatattagtgatcgaaatacccaattatgcattatggtatttcatatactttagacaaagacatatacccaatggatttcaagatgcgtcacgacggcaagggagcgaatccccgggagcatagataacgatgtgaccggggtgagtgagcgcagccaacaaagaggcaacttgaaggataacgggtataaaggataactcaatgctagccgaacttattacatcatatagaaaatcagccgcaatctacgcttttgttgataccggtttatctattcactttagaaatggagcttatgtagatatagacgaactttcccgtcaatgtggtattgattattcgcgactggatcgattatgtgatttcttaattgaaattgggatattggttaaccacggccataaagtcaccctttctgaggaatgcagtgcacttgccgatcctgaaagtatggagtcattaattgtaaaatgggaactgagtccagattgctggaacgcttggtcaatgtatccgagatctttacttgaaaatgatggaaaaccggcatttgaaataacgcatggaaaatcattctttgaacatttagcgagtaataaattactcaaatcaaattttgactcttcaatgtcaaagggctcagataaaataattgaaaaactacttgatatttatgattttggtcaatacaacagaatattagatattggaggaggtgagggaagtcttctggtaaaaatgagtgagaaggtaaaaggaaaacattacgctgtattagatagatatgatgaaattcctgttttggaaaatatcgattttataaatggagattttctaaaagtaattccatcaggttatgatttatatattttaaaggatgttattcacgattggtccgataataacgcaatactcattttagaaaattgtcgcaaggcaatggataatggttccgctgttttattgataagttatatgaaaaaaccacaatctaagatggtgatatatttggatatattaatggatgtactattttcaggaaaagaacgttatttgacggaattcgaacgtttggctaaccaggcaggattggttattcaagatgttaaagatatcgatgaatcatcttcaattatccagctaggaataaaataacttaaagataatcatgtattttcattaagtatataccctatggatttcaagatgcatcgcgacggcaagggaacgaatccccgggagcatagataactatgtgaccggggtgagtgagtgcagccaacaaagaagcaacttgaaagatgacgggtataattatatggatattgtttctctgaaaaaacatataacaagtatgtggcggattcgactaataagtgcaatttttcagaagggcggtcagttgctatagtaggcatctttctcgccaaaggaaaatgcactatggcctatacacaactgaccgaaacagaaagataccagatttccagtttaagagaagcgggtttttcacagctttttattgcgaagtcacttaagcgaagcccatcgaccatcagcagagaattgaagagaaatcaagaagtccagacatactgccctgaacaggctcatttgaaggtattggcgcgtcgtcattttgctaaaaaggccgtgaaaataacgccggaagtaaaaagatggataaaacggttaatttggaaagatttaagccctgaacaggtggctgattatttgaagcaacataaagggatatctttgcatcatgagacgatttatagactgatttatcaagataaaagagaggggggtgatttatggcaacatctgcgaatagccagaaaaccctatcgcaaacgctatggtcgctatgaaagaagaggtaaaattaaaaatcgggtcagtattgatgaacgcccggaaattgttgataaaaaagaacgtattggggactgggaaggagatacgataatagggaaagataaaaaaagtgtcttattaacattggttgaccgcaagacgctgtatacaattatcgttaaacttgatagcaagcaggcatcagaagtcgcgaaagcagcagtgaaagtattatacccgttaaaacaaaaggttaagaccatcacgttcgataacggtttggagttcgcagatcatgaaatcatcggtgaagaattagaaacccaaatttactttgctcacccttattcgccttgggaaagagggatcaatgagaatatcaatgggttaatcagacaatactttccaaagggaaccaattttaatgaaatctctgatcaggaaataaattttgtggtaaaccgattaaataatcgtcctcgaaaaacacggggtgggaaaacaccgaatgaattatttaaaggaatacgaacatgtttacttccagattaacgatgttgcacttattatgtgaatccaagtgtcattaaaatatttgatgacatacttactacctatccaatagggctattttatttgtccttcctcgcgtactattcctcacgtactacgtggtgtacgctccggtactgttcattgataagaatggcctgcaataatgattgcctattgggattggtaattaatctctataaaatatatggatattaaagcggaaggagaattcattcgttggaaataaaaataatttagatagcataaataactatgctaaataattttatttgatttttaaaactccttaaaagagttaattgtaatcttcatcatttctttttatcatgtttaatatagtctgataattaacaattttaaccctaaaaatacataactaaagtaagttaaccaattggagaataaggaaaatgatatctgcattatattactaagaaaggatagtaaagttaataatctcattctaattatcagaatacctaataaatcatcacggtattttctgaattttagataaaaaattcacctttttataccctgtggatttcaagatggatcgcggcggcaagggaacgaatccccgggagcatagataacgatgtgaccggggtgagtgagtgcagccaacaaagaagcaacttgaaagataacgggtatataagataaagatataaaggataactaatgctagccgaacttattacatcatatagaaaatcaattgccatttatacttttgttgataccggattgtctgttcactttaaaaatggcacctatatggatatcaacgaacttgccagccaatatggtattgattattcgcgactgaatcgattatgtgatttcttaattgaaatcggggtattggttagcagtaatgatagagttgcactttctgaggaatgtcgtgtgcttgctgatcctgagagtatggagtcattaatagcaaagtgggaatttaactcaggtctctggaacgcttggttaatgtatccaaaatccttacttgaaaataatggtaaatcggcatttgaaatagcgaatggaaaacccttctttgaatatttggatagtaataaattgctcaaatcaaaatttgattccttaatgtcaaaagattcagataaaatgattgaaaagctatttaatgtttatgattttaatcaacacgataaaatattagatgttggtggaggagaagggaatcttctgataagaatgagtgaaaaggtgaaagaaaaacattatgctgtattggacagatataatgaacttcctgattacggaaatataaattttatagatggagatttttttaaatcaattccgtcgggttacgatttatatattctaaagaatgttattcacgattggcctgataatgacgcaatactcattttagaaaattgccggaaggcaatgggtaataatgcaactattttattgataaccttaatgaaaaaaccacagtctaatataattaaatattttgatatattaatggatgtatcatctttagggaaagagcgtgacttaacggagttcgaatatttggctaaccaggcagggctggttattcaagatgttaaagatatcgacgaatcatattcaattatccaactaggtgtaaaataaattatagataatagtggagcttcaccaaatatgatgatatggatattataccttatggatttcaagatgtatcgcgacggcaagggagagaatccccggaagcatagataacgatgtgactggggtgagtgagtgcagccaacaaagaggcaacttgaaagatgacgggtatatatgtttgataactttatggcaagtatggcattgaaatatttgatgccatatttttattttatatcaataaaatattgaaatagaatatggatttaaatgttgataataagagtagtttaatcgctaaaatattaaaattaagttatattcccttgtttgattttcaaatgttctgaaaatatttaattgtgatcttcatcatttatttttattaaatttagtatagtataataatttgcgtataaaaatagataatttaggtgagttaattggttggaaagtaagggaaataaaatatttattatctcatagggaaaagataatataccctatgggtttcaaaatgcatcgcgacggcaagggagcgaggtgagcgagtgcagccaacaaagaggcaacttgaaagataacgggtataaaacacttcatttctttatgatatacaggataacgctatgctaatcgatcttattacatcatgtagaaaatcaaccgtaatttatgcttttgttgatatgggtttatctgttcactttaaagatggggcctgcgtaaatatcagtgaacttgccagccaatatggccttgatcattctcgctttagccgattatgtgaatatttaatcaaaataggggtattggttagctgcaatgagggagtggcactttctgaggaatgcagtgcacttgccgatccggaaagtatggaatcattgatgataaggtgcgaagttagcccagaatactggaaagcttggtcaatgtattcaaaatccttatatgaaaataatagcaaaacggcatttgaaatagcgcatggaaaacccttctttgaatatttggatcatcatgaattgttcagatcaaattttgattcttttatgtcaaaaaactcggacaaaataatagagaaattacttgatatttatgattttagtcaacataacagaatattagatgttggcggaggagaaggaaatcttttgataagaataaatgaaaaaatcaaaggaaaacattacgctgtattggacagatataatgaaacgcctgttttagaagatattgaatttataaacggagatttttttaaattagttccatctggttatgatttatatattttaaagaatgttatccataattggtctgatagtaacgcaatactcattttagagaattgccgaaaagctatggatgataatgcaactattttgttgataggtacggtgaaaaaattaaaattagaaataattgactctaccgatatattaatggatgtactattattaggaaaagagcgttatttgaatgaattagaagatttggctcaccaagcaggatttgtcgttaaagatatcaaagagataaatgagaaatattcaattatagagctaggtgtaaaataaactacagataattatataccctatggatttcaaattgcatcgcgacggcaagggaacgaatccccgggagcatagataactatgtgaccggggtgagtgagtgcagccaacaaagaagcaacttgaaagatgacgggtatagtgtctctgaaaacaggtataacaaatatggcatcaaaatatctgatgccatatttctatcttatattattgcattaaacttagcgcctatcccaataaccttgttgagataggctgttaattaacaatgggtagaatatgactacctttcattgatgatatttgaagaggaactcattgacatttttttcctattgttgaaatagtatgtttataaaataccttatagtttttcaggttttataattatttatttcttctataaatgaatgtaaatagtaatatatattctacgttatttttttatatttaaccatcaagaattctgagaagagctaattgtgatctttgtcatttctttttatcaaatttaatataatctggtagcttacttttaacaatgcggaagcaaagtgaattatatctttgcgcgaaaaagtaacaaagttaataattacattttgttttatacccaatggatttcaagatggatcgcgacggcaagggagcgaatccccaggagcatagagaacgatgtgaccggggtgagcgagtgcagccaacaaagaggcaacttgaaggataacgggtataaacagattgttgcgatatccaatctatcatcatgttatttcttggattttggataaaatacttaattttttcataatatataccctatggatttcaagatgcttcgcgacggcaagggagcgaatccccgggagcatagataacgatgtgaccggggtgagtgagtgcagccaacaaagaggcaacttgaaagataacgggtatacagataaaaaggatggctcaatgctaactgaactaattgcatcaaatagaagatcagctgcaattcatgcttttgttgataccggattatctactcactttaaagatggaatttatgtcgatataagcgagctttcccgtaaatctggtgttaattatgctcggtttagtcgattatgtgatttcttagttgaaatgggagtgttggttagtaacgataataaattcaggctttctgatgagtgtcatgtttttgccaatcctgaaagttttgagtcattcatgataaagcttgaaatttgctcacattacagtaacgcttggttaatgtatggaaaatccctatttgaagatgatggcaaatcggcatttgaaatggcacatggcaggccattctttgaatatttggatggtaacaagtttctaaaatcaaattttgatgctttaatgacaagagtctcaaatttaatcgttgagaagttacttggtatttatgattttaatcagcacaatagaatattagatgttggagggggcgaaggggagcttttagtaagaattagtgaaaaagtaaaaggaaaacattatgctgtattggatagatatagtgagcttcccgtttctgataatatagattttatcaatggaaattttctaaattcaattccatcgggttatgatttatatattttaaaaaatgttctccataattggtccgatagtgactcaatactcattttggagaatttccgcaaagcaatggataaaaactcatctctattattgataaatatggtgaaagagccagaattttctagatctttcgatatattaatggatgtgttatttttagggaaagaacgtagttttactgaattcgaatatctggctaaccaagctggacttgtcgttcaagagactaaagttatagatcaatcatattcaccgtattcatttatcaaactacagataaaatagattgtaggaactacagattattcccaaagatgattacatgatattgtgtttttgaggaattaatatataaaaaaagcatcaagattttttgatgcttttttatattaaagagatatatagattaaaatagaaagtgaattgaatttaaaaattgatgataaaagaataaattaaataaaaatattaaacctaatatttaatcattccttgcattattcgtgcttaataaggaatatacccgttatccttcaagttgcctctttgttggctgcgctcgctcaccccggtcacatagtttgctatgctcccggggattcactcccttgccgttgcgagccatcttgaaatccatagggtataagcaggatatacttatcctgctgcgatgattataaacgtattaacgtttctcttcttgctgctcctgtttcattatttcacgataccaacgtgggtgatgtttcttcgcccatccacgggttacccaaccttcaaccattgctcgaagagttcctttcacccagaatgccgcataagcgtgaaccataatcgtcaagattaaaccaatagctgacattgaatggattagaagcgcaattcgaattattggaatagagaagagatcagcaaaataggggcgccaaataataacaccactgacagcgagtaatatcaggaaaatagtgatagaccaataaacccctttttgacctaagttatactgaccaatatcacccgcttcctcattttttacaatcttacggatattttttagccatataatgtcatctttgtcgataaagttatgtttaaaatatctgaagaacataaagataaataaaataaacatcactgaaccaacaaagggatgcaaaatccgtgacaattgaggtgtaccgaagatattcatcagccagttaaaagaggggaaaaagaatcctaatccactaatggcggtaaagaaaaaacagagcactaccgcccaatggtttattcgctcaacaggtgagtgacggataataatatctttcctgcttttcatcgctgttcctccccattagctgatttttgtgatgattccgtatcacgacgcgcattttcctcgtcttcttcagtcactcggtttggtccaattcccacataatggaagaggctggcagcgaatgtggcagcaaatcccactgcggccagcggtttccagatacctttccagaaggtgacggtcgggctgatagcgggattgtccggtaagccatgatatagctgtggtttgttagcatggtgtagcacatacatcacatgagtcccaccaaccccatcaggatcgtacaggcccgcgttctcataacctcggcctttcaactcactcacccgttcagccgccaaatctttcatcgcttttttactgccaaaatggattgcaccggtcggacaggttttcacacaggcaggttcctgaccgacgttaacgcggtcaacacacagagtgcacttatatacccggttatcttctttgttgatccgtggcacattgaacggacaacccgcgatacagtagccacagccgatacagtgttcagactgaaaatcaacaatcccatttgcatactggataatcgccccttcggctggacaagctttcaagcagcccggatcagcgcagtgcatacaaccatctttacgaatcagccattccagtttgccgttctcttcaacttctgagaagcgcatcacggtccatgatttagcggttaagtccgccgggttatcataaacaccaacgttatgaccgatctcgtcacggatatcgttccactcagaacaggccacctgacaagctttacaaccgatacatgttgtcacatcaatcagttttgcaacgccctcttggtcatcccgcacccgtggtgcaggagtaaaagaatttgtggcagagcgacgaatgatgtcttgagtttgcaatgacatgatttctcccttacaccttttctatattaaccaggaacgctttgaactcaggcgtttgtgtgttcgcatccccaacaaatggtgtcaacgtattggcaataaagcctttcttcgcagccccttcaaagccccaatgaatcggaataccgatagtatctacttcacgaccatgtacattcagggttcgaatacgtttggtgacaaccgctttcgctttgatgtaaccacgattagagctaaccttgacggtatcaccgtgtttgatgcctttcttttccgccagtttttcaccgatttctacaaactgttcaggttggataatcgagttcaataatgcatgttttgtccaatagtggaaatgctctgtcaagcggtaagtcgttcctacataagggaatttatctggcttacccattgcttcaaagtcgcttttgaacactcgggctgccgggttggataccacattcggatgcaatggattggtccccaatggtgtttcaaaaggttcatagtgttcagggaacggcccttcagccatcttatcaatagcaaacagacgtgccataccttccggttgcatgataaatggaccaacatccgtttccggtgccgccacgctgtaatcagcagtatcgacaccaccccacttagtaccatcccacgtcagtaactgacgtttcgggtcccacggcttaccctgcggatcagccgatgcgcgattgtacaaaatacgacggtttaacggccatgcccatgcccaacctagcgtattacccaatcctgatggatctgcgttatcacgacgggccatttggttaccttccggcgtccagcttccagcaaagatccaacaaccactggcggtcgtgccatcatcacgtagctgcgcaaaagaggttaattgctgaccttgtttcacgatgacgttgccattagcatcaatcagatcaaccagtgcccggccattactctcttgagccacctcttctgatgtggggttgtccgggttgaagtaatcccaagtcatgctcagcatcggctctggtgatgcacccccttccgtgcggtacatatcccgcagacgtttgaagattcctgaaaggatttcgccatcaccgatggcttctcccggtgcatcagcccctttccagtgccattgcaaccagcggccagagttaacaattgagccattttcctctgcaaaacagcaacatggcaggcggaaaacttctgtctgaattttggatgaatcgacttcattaaattcaccgtggttctgccagaaagttgaagtttcagtattaagcggatcgatcgtgatcaggaatttcagtttcgacagggcaccaacgactttgtttttattcggaaaagaggctaccgggttaaagccctgacaaatatagccattcacttcacctttcgacatcatgtcaaaaaattgcagaacgtcataacctttgtcccatttcggcagccagtcaaaaccccagtcgttatctttacgggcattatctccgtagaaactcttcatcagactgataaagaattttgggtagttaccccaatagttaacctgacccggccgcattggttttggcgtatttgcctggaggtaagtttgcaaatcagcctgtttctctgaggggagtgtcagatatcccggcaagctttgcgacaacagccccaaatcagtcaatccctgaatattcgagtgaccccgcaatgcattaacaccgccacctgccatccccatattgcccaacagtagctggattattgccatagtccggatgttctgtgcacccactgagtgttgagtccaacccagcgcgtacagaaaagaagcggtcttatccttaacacaagtttctgcaatatattcacagactttcaggaagtcctcttttggcgtaccgcaaatattactgacgacatctggcgtgtaacgactaacgtgctcttttagcagattccatacacaacgtgggtgcttaagtgtgatatcacgttgagcaaagccgttttcatccagtgcatagttccaactggttttatcgtattgacgtttttctgcatcgtaaccactgaacaaaccatcatcgaacgagtaatcttcacgcacgatcagactggcgttggtatacgcctcgacatattcatgattaatcttatcgttggtcagtaggtataaaatgacacctgacaagaaagcaatatcagtaccagaacggattggagtatagaaatccgccacagatgctgtacgggtaaaacgcggatcaatcacaattaacttagcgttattatggattttggcttccattgcccagcggaatcccactggatgtgcttcggcagcgttaccacccataacgacgatcagattcgcgttcttgatatcaacccaatggttggtcatcgcaccgcgaccaaatgttggagcaagacttgctaccgttggtccgtgtcagacacgtgcttggttgtctacggcgagcatgccgagagcgcgactaaatttttgcgatagataacctgtttcgttactggcagcggatgcacacagcataccggtcgtcagccaacgattgactgtgacaccctcttgattggttttaatgaaattagcgtcacggtctgctttcattagtttagcaatgcgatcaaatgcctcatcccaagtaatacgttgccatttgtcagaacctgctgcacgatattccggatatttcaggcggctttcgctatgaataaaatcaaccaagcccgcgcctttaggacaaagtgcaccgcggtttactgggtgatcaggatcaccttcaatatgaaaaatagttgctttcgcattttttgcgccatcgccaaggctgtacatcaacagcccacagccgacagagcagtatgtacaggtatttcgggtttcacgtgcacgtaacagtttataattacgcgtttgtgcaagggctgcggttggtgcaaagcccaatgctgctaccgttgtacctgccataccgccagcgcagatcttaaagaactgccttctgctgacttgcatgggaatctcctcgctcacattgtcttaaaatgcattgtcttaaaacagtatccattccatcatgggaaaaatttcaaatgtattctttcttattaaaaccactttccgtagcgggatcagatttattgcctgacaaatagtatagactcttttttccacacaattattgtgtcgtaacactattaggaactcatctaatgtataacgtaaaatcagggaagttgttaccatttggtgtgattgagggggtaacacgaacgaatgtgcaacaaaaacaccatttcgatacattaaaagttgattggattgcagaagaagttcctgttgctttagtttataacggtatttcacatgttgtgatgatggcaagtcccaaagatctcgaatatttcgctattggattttcactttccgaaggcatcattgaatctcaacacgagattcgtagtattgatattgtcgctcattgtcgcggcggcattgagttgcaaatagaactttctagccgccgttttgcgggtttgaaagagcgcagacgtaatctggcgggacgaacaggttgcggcatctgtggagcagaacaactttctgatatttttcgccctatttccccgttgcctttcactcaaactttttcattaaaccagcttgactatgctctctctcagctgactagcgtccaagatgttggtgcattgacaggttgtactcatgcagcaggttggatcaatccggaaggtaaattattgggcggatgtgaggatgtaggtcggcatgttgcactggacaagatgctaggcatgaaggcaaaaacaggctggcagcaaggcgctgttctggtatccagccgtgccagttatgagatggtacaaaagtcagccatctgtggcgttgaaattttattggctgtttcagccgcaacttcattggcggtagaaatcgctgaccgatgtcatttgaccttggttggtttctgtaaacccggtaaagcgactatttatacccatgctgagagattaataagttaaacccgctaagaatatgcaatatcaagagtgcctatattcccccccgctgtgattaaggtgaaaagtttatttttatcttaaatcaacagagattgtcttaataatgctaaatcacgcatgcaagttgtgaaacatccataggttgggttcaatgtaataagccatttgttgttgtacatccaccactagcggccctaaaccaccaggaataatatactgcccactttgcagaaatttcattcctgtccattcctgccatttatcaagcgtggcatttatagacattgagtgcatagccggttgaataatcttcgctcccaggcaccagggtgtccgaatccaaggatcaaaaggttcattgttgtcatttttccatctacagtattgtacaaaatcctgcaatggatagttttgctttaacgtcggcctaacaggaacaactaacccttttaacccctcctcaatagccgcttgttttaagctactaatgagtaatgccggtaaattcttgccacgaaattcaggagatactgttactgacagtgctgacaacatttttgttactttttttccacgggcaaacatacctctgcggaaaacttcatcccaaccattatctggcagttgttctaatgaatcgccttcccaagggaaaggtactgaattagcaacaccaattaatcgctgtttttctccttgctgcaaaatagcaaattgctgaaaacggctgaaatctgatttaaataatttattccaatgctcatatgttactggggagttctgcataaacaaaggccaattattataaataagctcatcagtggcattttttaaatcaggtcgttgttttgcagattgaataataatgtgtgttttcaaagtaggatttccggtaaaagtaattcgtaagattgataaatgcttcatgagttgataattataattatgtagaatagcagtaatatttatagacataaagagataatatgttttaagtaattgttactaagagctaattaaataaattttttatcttttattaattatttaaattaaatttttatttatcaagcatacttgaattcacataataagtgcaacatcgttaatccggaagtaaatatgttcgtattcctttaaataattcattcgttttagctctcctcatgaggataattttatgaattcatcaatattttccatgagttttcatatatcttgataacaatgattatgtgtcactatttcacacagggattgtcatcgccttatgaccgataaattggagatcaatcacattggtatcacataattgatacaggttgacttttattgaacctgattaatgttaaagtataagtatttattatgtatatgaattcagcaattcaattattgctgcaagttttctttcctaagtgatttatctgtttcttttccaatttgatgtgactatggctgatatttaggccagtaagaggagagcctgatggcgggtttactaccgattactgtaattgctgcggcggcaggagatattgttcttagtttgccgagacttcctcgtagtggagcagatcaggaagctaaagaaattgatcggcagattggtggttcaggtttcaatgttgctcgggctttagttcgcctgcaaatccctgtgattaatggtatcccggttggtaacggatgctggggggagcagataaccaaagagatgcaggaccttgggcttgaggtcacattgaccaatccatatcttgataatggttggtgtttggcaatggttgaaccggacggtgaaagaagttttgtctccgtgagtggttgtgaagttgactggagtacggcaatgctctcttctattgttttgccggaaagggggtatatctactccagtggttatgtcatggcgagtaaatcaacggcgattttatgtgactggttactggcgtctccatccgggcagacgttattgctggattttggtccgcgtttaccagaaatagatcccactttccttgatgcattacctgctgaccggaccattctgacactgaaccgtgatgaagttgctatattgtgtggagaaggtgatcctgccgtccaagctagccgttattccagcgaaagaaaaatcactattatctgccggttaggttcacagggtacatggatatgtctgcctgatcgtaagccagaatatgttgctgcttataaagtaaaagtggtggataccatcggtgctggtgatgcccatagtggtggcatgctggcgggattatcgcagggaatgtcgctgagagatgctgttgaacttggcaatcgtgttgctgctattgtcgtcaaccgttctggtgctgctggtgcaccgacaataaaagaactagaggagtttgtgtttgaataattattttcaagcactacacctcttaggttttaaggggcgtagttaaaatgagtgcattacttccaggttggaaacgcaaaacggctttatttttatcagctcaaacaatttctttgctaggttcttccattgtccagttctctatcgtctggtatatcaccctaagtacttcatcgggggaaatgctggctatttcggtgctctgcgcatttcttcctcaggtattgatctctttatttgccggtgtttgggcagatacttataaccgtaagtggctcagtattgcctctgatgcgttaattgcattagtcactcttggtttagcaatctcttttatgctcggatttaagagcattgagctgttatttgtcgcactgattgtccgctcgttcgggacgggcatccaaatgccggctgttaatgcgattattccgcaactcgtgccgaaagagaaattgctgcgggtcaatggtattaatacttctctgacttcactgatgatgttggcatctcctgctatcagtggctttttatattctcaaacttcaattgagaatatttttttagtggatgtaacgactgccattatcggcattagtattgttgcgtttattcctattcctaaaattgtttctggctccatgccggataataaatttcaggcaatcttagcgggtttccgttatttgcaagagaataaactaatcagaaatcttttgatttttctgatttgtgtctgctttctggttagtccggctgcatttttgacacctttattagttaacaggacatttggggaagagccgtggcgtttagccattaatgaaatgacatttagtgctggcgcggttttaggtggattgctgatttctttctggagtgaatataaaaataaaatgcgtataacggcagtagcttgtgcgttgtttggcatatttatgatcgctcttggtaatgcctattggttcccgttttatctggtactcaatatctttttgggcatggtaacaccttgttttaatgcaccgataactgcggtttttcaggaaagagtcgaacctgaaatgatgggcagggtattcagtttagttcagattgctatgtcttgctctctaccattaggtatggtgctgtttggccccattgctgactatattagtattcaatctcttttaatgatatcgggtggattgatattactgacgggcacactgttttttatgtttaacggagaagtcagccgagaaagtagcagcgcagtttaatcggacttaatgttgccagttatgcgataagcgcagcgccgtgaattgctggtgcttcaattacaaccgtgcagctcttcgctactgcctttggagctgcattggcggggatggtggtgaacctttcaggatttaatgaaccgggtggtgtaacggggacagcttctgccgcatactggttattcttgttatttgctatcgcaccattgctggcgctgtttaccgcatggagagcagcgaagattaggttagtggctgagtagttctgttttatggtgcgagggatggattatgatatcgacgtttgttgatgacacgtcgatattttcctgttttttcgacgcacggtttccgcatgtcgattccatcgacatatcgctaacacgtgtcgaaatttttcggttttatcgacatgaagtttttacgtgtcgatgccgtcaacatatactcgcaacgtgtcgaaaaaaataggaaatataaacatgacatggcagcccgatgcgccttttaatgctattcccttattgccaccaaccgtaaaggtgatggagtctattgcggtattaaaagcctgtatacctgccagagctgcactggctgagcttaagcaagctggtgaattgtcgcctaatcaggggttactcattaacttgttgccgctgctggaagcaaaagacagctcagaaatcgaaaatattgttactacttcagacaaactgttccaatatgcacaagaagacagtctggctgatcctgcaacgaaagaagcactacgctaccgcactgcactttatgaagggttcatacaattaactcggcggccactatgcacgaatacagcgattgaagtttgtagccgactaaaagctgttgatatgaatattcgcaaagttcctggtacaacgctgagtaatcaggcaacgggtgagattatttatacgccgccagagggagaatctcagatacgtgatttactcagcaattgggagcaatttcttcatgcagaagatggaatcgacccattaatcaaaatggctattgctcactaccagtttgaggctattcatccatttactgatggcaatggacgtactggtcgtatcattaatattctctatcttattgaacagcagcttttgacattaccaattctttatttaacttgctacattgtacaacataagagtgattattatcggttgctttcccaagttactgctgctggcaaatgggaagagtggattatctatatgttaaccgcagtagagcaaactgctaaatggactacggataaaattgctgcggtaagagaattgattgaacataccagtgagtatataaaacaaggtttgcctaaaatttacagccatgagctggtgcaggtgatatttgancaaccttatgcccgtattagtaattggtgagagtgatatgctaagcgtcaaactgcttcggtttatttaaaccagttgtgtgatattggagtattacgagaaattcaggctgggaaagaaaagctatttgctcaccctaaactggtacagttaatgactaaggatagtaatacattgagttattacacagtttgaaaagtgtctacatcaaatttattaaaaatctttgtgaataactggtaaaaattgaagccgaacatgatgtagtaaaaaccgctagctttcattgttgcagtactgctggctatacaacgataaagagctaaacgtaatttgcagaagtgacttattctttgtttttttatgatggagaggctaatactctccggttgccattattctccggcatactgatgatatcagcagtttccatctgttcaatgatacgtaaggctctgttatagccaacaaaataatgtgtcgcttaaaaatttcttacaatacatatatccacttcgctggcatgaccttaaaaataagtagttactgcgacaatagtaaattttaatagcataactaattgatatttattaattattcattatttttgtacttagggaagtggggggggggagctttttcagataagagaaacactatagcttttttaacttattgggggtaacttatcagaatgattatagtgcgatggtgatgaaatatgtctttggatgtagcttatagcattgaattaaatgagtatatcgaccctgatcgagcttatgatttgtattggtctggattaattactaataaaaaattatttatatgtcctggcgaagattgttctgcacaggttacttgtgcgaatcttgatgaagatatgcagaacatgcgtgtagttcctcattatcgcatttatggtaaacatcatcctaattgtgaaatagagagaaaaattccgcttaagatattaagtgtcattgaaaatgctaagcaaggagagaaaaagacacttgatcagtcgatagttgattcttttatacttcatcgcccggatagttattatgaatctaagaagaaggatgataataaaaatcatggaaataagcggaataaatatctatcaaagtcacatgctcttaatctgaaagaaatcggcaatatagggaaagtctactcggttagaactatcgtaagtcgttatataaggtatattaaggataacacgttaataaataggaaattgaatatatctggaatggatataccatattctggggtgtttaaatgtatttgggagcagaaaatagattcgttgccagagtatgggattatatattatggttgggcttatatagataagtatgaaggtaaaggatatcgtattaaatttaaaaaaaagataaaaaactcacatggtgaattgctacaaacaacttgttttatatccaaaaagctaatagataaatatcatgtaaaaaaacttgtcatcaagaggttgtcaaaaataatacagacacaaaaatctacagcatttgtcttcatttatgggcggcctgaaataattagatcgaaaatcaataataaagagtatgttaatttctatgttgataacttagactacattgatattaatgtagataatcctcttcctaaaagaaaagtttaaatttaagtatggggaaaaacagggttcttagctgagtgagctagtattttttaccaacgttccgtaaattctgtgccagcgggctaacacttttctcactagtagcggtatctacagccagattttccagtgtattgtcgttatttaaggatatgtatgccattacgatgcagtatacaatcgtggaatgcgataatttcctgcgcattcacccaaatcatcggtaagtcaacgtctctacagtatatctgtggcgctgcataatgtgaacaaactcggcatccagtttagcatttcgataattctcatttcatttatatccgttatcttttaagtcacctctttgttggttgcatttactcaccccgatcacatagttgtccatgttcccggggattcgttcccttgccgtcgcgatgcacttgaaatccatagggtatatatggcagagtaaaataatgtcaatgcatggtgttgattttgcttttaatttttccaaccgaagggcgaaaaaacaatggagagtttaaagtatctccgaaggagatgctgaaagttagtccttgctttgaaactactattcttttttaattgtaatactgaaccaaatttctataatttcgattacttctacacatatggagttaacgatctcatccatacgctctatatctaattcatcatcaattgtaaagccaaaggataatggaattataagtatatttttttataggcttcttttttattttcatcaagtaaggttattactccatgagattttctatttttaatgtataattctattttttcctttgcaccggtattaaaattcaattcatcatcgaatagagcattaaaaagtttctttttgtttaatgccttcaatagatcttctttatcgcttgggttttcttttaaataggcgtagaaatctcgttctttgtttaatatgttatcattttttgtatttataatcgcaagtttatagttgtatagacctataaaaaaaacaaatacaggtataaatatcagcgattgtttcaagagagaaattggtgttttgaaaatttgttctgccgttaaaatacactcttcagagaaacaaaaaggtccatacttcgtttgaggataatatccaaaaaaaccatgattgccgtagaaatcatcgagaaaaagcaaactgtaataagtgaaattattatgtatgatattatgctggttagtgatgctttaattttcatttttaattggacttattaattttagacgagctttgaactcatttgcctctacaggatacagtttcttcaaaatttctaagcgaaatatgacttgaaaataacggcttctatatctttcagtgctaccaaaagtagcatgatcttttgataggttagatatcaccctattaattctttttatttctttatgttctgggaggggatcgcaatgttttgccagcaatttttttagaagaggataatcaggacaattaactcgttttaatttagtgattttccctttgacagaaaaatagacgtcatgataattcttctgcattctgatattatcacgattatatcctgtttttacaactcgctttacttgtgtttttatatttattctttcattctttgtaaatcgtggagttgtttcttctatacatagtccatgtactttaaacgattgtggtgaattagctgataataattgagtcttatctttattcactgataattctttctgcgttataaattctgaaatgatagtttcaacaaatttccaatcaccttctttttttaagcgagatactgttatatcgtcaattaaacgagtgtatctgaaaccgagactacgtaggtaatttaccttatttggctcacaatcataaaaatataagtttgctaaataagtacttgttggggcaccttgtggaacaaaaccatcatacgtagtaagctttgttaaaatgtttgatacttcatcagaaaacttaaataagtctttgaatatattgaaaacaaattttgttttcattgtagggaaaaaattttcaatatcaagtttgataagaatttttgctttacaatgttgatgagcacataaaatgtaatcgcgagggttttctttgtctggtattgaaccatacaaataatcagggaaattaatttgattaaatattctattgtttatttttcgaagaattgatttaagcattcgatttggtgcataaacaattcgttcaccaccgttttttttcttaatcggtggcttaatataatatgcgttttcaacaccatctctaagcagactttcaaatttttcaatatcttttatccccagcaagccgattaagctttcttttctttgaatgggagtaaaagtatccttaaacgagaaaccctttggcatgtaatccttcttagataaaagttagcgtcctcacggccaagaagggcagttgaatccgaaggaagcaacacaaaagtataaaatccaccctaccttcactaactttttccaactgtgtactgtactccgtggtctagcttttgcatggctcgccagagtgcacccagaaagacctttcggtcgtcctagacttaaggacagatctttttgctttaacgcttcctttttcatcaagtgaggtcttagtcccacgaaagtcttttaccagaaatcggattgctcttaaagtttttttattcagtatctaataactgatcttcaagacgggaattgctagatttgctaatagccatgtcgttagtcctctaacggtgtagttagcccctgtctggtactgctaatacctttcaggggagagattggtgatgagatacttttgtggtagggtacgtacctataaaagccatcatagtcaaaaaggtacgtacatgtcagcgataaaacgcgatacgaaaaaatcttcatcggcaggcaaatctccgactttccagatacggatatcacctgagctacgtgaacagcttgatgaagttgtggtaaaagaaggtgtcagcttgggcaactggttcaaagaactcgcccgtaaagagcttcgtaagcaagggattgagccgaaggggtgaacgggctactgtttgctatttaaatctcccttgacattgtatatcagttgtattaaaatccactatgtagattatgtggcggtagaggcatccccacgttaaatagaacaacctcattggattatgtggcggtagaggcatccccacgttaaatagaacaacctcattggattaatctacacggaaagccctccattggagggcttttttgcatagagaataagaatatgatattgcgccagatcaaacaagatgtctacaacaggctttgtgaaaatagaccgcaagttttagaaaaaaatagggggtatggcgttatatcgattactttaaacggacttacattcgcagtccctttacgaagtaatctaaatcatcctaatgggttcaagactatcttcataaaggaaaaaaaatgctggagtggcttagattactcaaaagctttactcattgatgttgatgatctagaaccacaagcttttaagctaaaaatggaaaaagagtatgaaaagttaaaagcaaacgaaaaaaagatcgaggtggaatttggggcttatgttcaaggatacattgaatacataaatactggtgagggtgatgatcgttgttataaatttactacactccagtatttccatagagatttgggcttatagccactaattatattaatattgctaagttgcccatatttctagctgaatcaaagctatctgtaaattcagctagtcagctttatatgcgagtggttaaataatggattcaagtaatttagcaactttcaaatgagcttctttcctttcttcaaaataatcatatttggccataaatgctttcaacacctttgagcttgtgattaaggcatatgaaaaggaacgaaagagaggcaggtagactacggcaagctcgtcttaaatcatgaacagagaacctctaaaatctgtccgatgaaatgatggaatatcagttgcttgatcgtgatcgccttagctggcagcatttctgtcgtctggccgatgtcatcaataatattcctgaccgaaataccatttgacattttgaacagcgtatcgggaaagatggcgctcaggctttatttgaagacgctaaccgccaattatccgctcagggatttattgcctgtcgcgggcaggttattgatgccacgttgatctcaacgcgtaagcaacataatacccgcgacgaaaatcagcggatacgcaaaggtcaccccttaatgactggagcgcgcacaagcgctgtcaaaaagataccgaggcaacctggacgcaaaaacacggtaaaaattatttttgtatcagcttcttgtatagtaattgatagaattgagtggactttactcaatattctgaatctgctccctcatctgttcgattagcactttcaattcaatagcggagttagtgatatcggcgttgatagatttggaggcaagcgtattagattcgcgattgaattcctgcatcataaaatccagtcggcggccgacggcttcttttttctttagaatattacgggtttctttggtgtgggcatcaaggcgatctaactcttctgccacatcgaggcgttgagccagtaaaactaactcttgctcaagacggttattttcaagctgtacctgcgcttcttccaatttggtttgcaggcgttcccgctgccattgcatgatttcaggcatttgttggcgaactttaccgacttcttcggttactgcgtccaaacgttgttcaatcataattttaagtgcgttgccttcggcttcacggctttgaataaaggcatccagtgttgtatccagttcttgcaacaattgagtgttgatagcatccaggtcttgctcttctgcggccataacgccaggccaacgcagaatatcaacagggttgatttcaccttcgttgctctgttgtttgacccagttcgccgcattgactagctgttttgctaaagtttcattcaggataagttcgccttgagagcgtgaatccagttcaaaacgtaagttgcactcaacttttccgcgagtcagacgggaacgaatgcgctcacggatcaccggttccaagcttctgaattgttctggtaggcggatataagtttctaaataacgctgattaacggagcgtagttcccaagccgcatttccccattcacttttgatatctcgccgtgcaaaagcagtcatactacggatcatgattcgttcccaatttaaacaaaagattaagagattataacgctcgttgtagatgcaggataggaattagccctgttaggccgtataatgcgcccccaataatgatttaacaacggagataacactatgcgcccaacaggaagagcggcagaacaagtgcgtcctatcacgataacccgtcattatactaagcacgcggaaggttcggttctagtagagtttggcgatactaaagtgttatgtaatgcctccgttgaagaaggggttcctcgtttcttgaaaggtcaggggcagggctgggtgacggcggaatatggcatgttaccgcggtctactcatacccgaaatgctcgtgaagcagctagaggcaaacagggcgggcgtacgatggaaatccagcgtttaattgcccgttcgctgcgcgccgctgttgatttaaaaaaactgggtgaatacaccattacactggattgtgatgttattcaggctgatggcggtacccgtaccgcttctattactggtgcttgtgtcgcgctagttgatgcgttgaataaaatagttgaagcaggcaagctgaaagagagtcctctgaaatcaatggttgctgcggtctctgttggcattgtggatggtgaaggtcgttgtgatctggaatatgtggaagattccgccgctgaaactgatatgaacgtcgtgatgatggaagatggccggatgattgaagtgcaaggcactgcggaaggcgagccatttagtcatgatgagttgttatccttattggctcttgccaagggaggattagaggatatttttgatgcgcagagaaatgcgttaaaacaaaatgcattaaaataataagttgatcaggcgacatgatagtcgccttttttatgcctgttgtatgacgataactatgactcaaaaagaggagagacaccaatgaaagcctatcagcgcgaatttatcgagcttgcgctaaaaaaacaggtactgaaatttggggaatttaccctgaaatcaggacgtaaaagcccgtatttttttaatgccgggctatttaatactgggcgtgatttggcgttaatcgggcgtttttatgcagcagcattgttggatagcggtattcagtgcgatttgttattcggacccgcttacaagggtattccaattgcaacaacaacggcagtggcactggcagaacatcatgatattgatatgccatattgttttaaccgtaaggaagctaaagatcatggcgaaggtggtactttggttggtagcccacttaaaggcaatgttgttctggttgatgatgttattaccgcaggtacagctatccgtgaatcgatggagattatcaagcagcataatgcgacgcttgccggcgtgatgatttgtcttgatcgtcaggaacgtgggaacggtgaaatctcggcaattcaggaagtggaaagggattatggttgcaaagtgttttctatcattactttgaatgatttgattaattatttgagtggtcagccagagatgaaagatcatctggatgcagtaaaagcctatcgtgcgcagtacggtatctgatagataagcttcaaaaaaagccctcgcccaataacgggcggggtgagtagtagaataacttattgtaactgagccagtaataatggccagcgtgcttcaaattcctgcgttggacgatagtggaactcagagcgtacaaaacgtgaaagcatcccttcacaaaatgcgagtaactgagatgctaataacgactcatcataactgaaaccttgtccatcacgtaattttttctcttttaaaacttggcggatctgtacttcaattcgttcaaataactgatttatgcgcccttgcagccggttttgttcaaacattagagcatgacctgtcatgatgcgggtcagaccgggatttttttctgaaaaacccaagatcaggaccaatatcaggcgaatacgagttatggtatctttttcatcttgcagaatcaggttaatccgtgaaattaatgagtcttcaatgaactcgatcaagctgtcaaacatccgggttttactaggaaaatgccgatatagggcagcttcggaaacacccacgttggcggccagtttagcagtagtgatgcgatggctaccgtcactggattgcaacatatgcgccagcgcctgcaagatctcctcgcgtctgtttcttttctttgtattttcgttttctgccatgtctgacaagacctttgttaagaacagcaaaacaaacaaatcagtaattctttgctcaagggtattttgagcaaagaatatgataatgggttatacccgtcatctttcaagttgcctctttgttggctgcactcgctcaccccggtcacatagttatctatgctcccggggattcactcccttgccgccgcgatgcatcttgaaatccatagggtataaacggtatggtcttacagagatttattggcgaccggaatgaccgaaaccaccgctgcctctttcgctggtttcaaaatcttctaccagattgaattcagcctggacgacgggtacaaaaactatctgagcgatacgttcgcctggttggatagtgaaagctttatcaccacgattccagactgaaaccatgagctgaccttggtaatcagaatcgatcaaacccaccagattccccagaacgacgccatgtttatgtccaaggcccgaacggggcagaataacggcggccagttgttcatcaccaatatgaatagcaagcccggttggaagcagttctgtttggcctggagccagttctaccgcattgtccaggcaagcccgcaaatctaaacctgcggaacccggtgtggcgtacgttggtaaaggaaattcttccccgatacgtgggtcaaggattttaacgtcgatttttttcatcatagcgtctgactatctcgtctaataaatggtggctaagtaataacttattactatgaggtaagcggatttctccctcatgccagaacaaatgtaatgcattagtatcactgttaaagccgtggccagtaagggatacatcatttgcacaaatcagatccaaatgtttttggttcagtttttttcgtgcgtattcttccacattctgggtttcagccgcaaatccaaccacaaaggggcggttttcttgcattgctgctacattggcaacaatatccgggtttttgatcagggtaaaagtgatctcatcaccctgttttttaattttttcttcggcaatctgtttagcgcgatagtctgcaaccgcagcacaaccaatgaagatattctgtgaacccgctactgcctgtgcttgttcattcatttccagagcgctggtgacgttgattcgtttgactcccggtggtgtcggtaaattaacggggccagtgatcagggtgacttctgcaccacgtgttgccgcagcctgggcgatagcaaaccccattttgccggagctgtgattgctgataaagcggactgggtccaatgcttcacgggttggtccggcggtaatagcaagttttaggtgagctaagtcttggcttgcttgaaaatgttgttcagcgagttcgacaatcgccatgggatttagcatcctgccgggaccaacgtcaccacaagcttggctgccgttgtccggtccccacaggagaacgcctcgttcttcaagatgcttgagattatgttgcgttgcttgagctcgaaacatttgttgattcattgcgggtacggcggcaattggggctggggaggccaaacaaagagttgttacgagatcatttgccataccgacgaccaggcgtgccagtaaatcagcagtagccggggcgagaataatcagatcagcccatttaccaagttcaatatgccccatagcagcttctgctgctggatctaacaagtcatcggaaacgggataaccagaaaccgcctgcaacgtcattggtgtaataaacgattctgctgctggtgtcatcactacacgtacttgtgcgccgcgatcacgcaggcgacgtactagctcgggagttttgtaagcggctattcctccgctgataccgagcacaatctgtttgccggaaagtcctgccatcatgattgtccgaatatataagttgcaaggggccaagattttatcacaagagattacagagttgagcagagtctgagctttgattgtaaaaaagaataagtttgcgagcggctacgcagctccggaatatgatattcgcccttatatttaaggcgtggaatactgtttgtatcaggtgaaacagagcagggagatgaatatatgggaattgatgtcgctgaaaatacaggagaaatatattcaaatttagctcccagagaaaaattgttggcttatggttctgtttctctaacagatgctgagttactggctatttttttacgtaccgggaccagaggacttcctgttttacgaatggctgaatttctactgaaagaatttggatctttgtaccatttactctctgctgattatgacactttttgttctcataaagggatgggattggctaagtatgcacaattacaagccattgcagaactggcaaagcgttttttttccagccagtttatgcatgaggatattatgagtagtccaagtgtgactcaagagtacttgcaaaacctattatcagggcgcgatagggaaatatttgttgtgttgtttctcaataatcaaaatagagtcatctgtcatgaggagatgtttaaaggcaccattaataaagttgaagttcatcctcgtgaaattgtccgatcggcgataaaggtgaatgcttcatccgttattttggctcataatcatccatcaggtcatgcagaaccaagtttggcagataagattgttacagataaagtgattgatgcctgtaatttggttggtgtaaaagtgctggatcatctggttattggtcggcaatgttgtgtttcatttgctgagcgaggatggatttagctaactttttcaagatccttatggatctttggttgtgcgggacttgagcgtcagcgattgagggcgtatactacgccacctttgaggatctttggtttggcgagaagagcctatctcagcacattttctgagtaaatgtgagtcttttcagtggaatttgctgagatgggctcctaagcctgacgaggcggccatacccaatacaaagctcgagctgatttgatttttggagaatagacatgtcccgagtctgccaagttactggcaaacgcccgatgagtggtaataaccgctctcatgcattgaatgcgactaagcgtcgttttctgcctaacctgcattcccaccgtttctgggttgagtccgagaagcgttttgtgactctacgtgtatctgttaaaggtatgcgtgtgattgataagaagggtatcgatgcagttttggctgagcttcgtacccgcggtgagaagtactaaggagctgaaaaatggctaaaggtattcgcgataaaattaagctagtttcttcggctggtactggtcacttctataccactacgaagaacaagcgtactatgccagagaaactggaaatgaaaaaatttgatccagttgttcgtcagcatgttatgtataaagaagccaagattaaataattttggttgatttgaaaaaaacccgacttaggtcgggttttttattgtaagaatattaaacagatattcactgattcttctttctatttcatagaaattttgttattcgtagacgtaagatgctgtttagctatactaatgccttccggtaggcggaatatagaaacaaaatggctaaagaaaaactaaatattttacatacagaatcatcttgtggttggggtggtcaggaaatccgtatcctgacggaatcccaaggaatgataaaacgtggacacaaggtggttattgtctgttgtcccagttctaatatctaccgtgaagcaaaatcttatggtgtgccggccgtagctctgcctattgaaaaaaagcggctgtcctgcttgcttgctatgcgtcgttggttgaaaaaagaaggccgtcaatttgacgttattaatacacatagctcgacggatgcatggttggttgctgtagcttgtgcaacgttaaggcatatgccgccaatggttagaaccaggcatgtttctactcatgtttctaattcaatatcaactcgttggttgtatctgaaagcgtgctggcatattgcgactaccggtgaaaaactacgccaacatctgcatgctaataatcgttatccattacagcatatgacatcagtgcctaccggcatcgatttagatcgtttccgaccggaagataagaaagtttgccgtcaacggattgggattcaaaataaaccgacattaggtgtcgttgcgaccatgagaacctggaaagggcatcgctatctgttggaaagctggaaagttctgcatcagaaatatcctgattggcaacttttgtttgttggtgatggtccacaacgtaagtcattggaacctttagtaaagcgagaaggtttgtcaaacagtgtcatttttttaggtaaccgtcaggatgttcctgattgtttgaatgcgatggatttatttgcattaccttcttttggtaatgaaggcgtgccacaaggcattatgcaagcaatggcgtgtgggatacctgttgtatcaacctccgttggtgcaattaccgaagcggtagttgatggtgaaacgggttatatcgtggaacccagaaatacagagttattgacgaaaagtttagagttgttgattcataataatgaactgcgtttgcaattcagtcattcttcattagagcgggcaatggctttatttggcatggataatatgttggataaaatggaaaatatcttttttcacagcattaaaggtaaaaaacgttaacattatttaggatttattctggtcttattctttggtttatggttttgggtaatgttcaacttattgatattaaattactttaaagttgattattagttaaatcacactgttgtggtcaatcgtatacaaaatggtttttttatatattttgttgaattttatggcagattaattagataattgtcttatgcagatcaagaatattctggtcattgttatagcacgtttcggtgataccttattggtaacgccagtgatccgtgctttaaaacagaagtggcctggtgcaaatattgatgttatggctcataaaaggactaaacagatccttgaaaatataagcgatatcaataaattgactgctttttcgaaaggtaaggcaaaatggtgtggttggtttacccgtaagcattatgatctggctttagtatacagtgacgataaacctttattacagtatgcgaaacgtaaatcacacttaacggtttcattttcagataagtccgcgttgcaatctggttggctgacagtggaaaagccaaaggggttgatgccagctcagcaggaacgggccatgcttgctagtgcggtagatgttgaggtcaatgattggcggttgaattattgtgtgagtgaaaaggagttacactttgccgagggttttatacggcagtatcatttagagaacaagctcctgattggttttcagttacaaagtttcccggcaaaagcttatcgtgattggccggttgaacatttttaccaattagcgcaacacatttgtggccgttatccccagtcgcatattatgttactaggcagtgctgacggtaaaattgctgcacagtcactggcaaaaagattaggggctgaaaagtgcacttcattggttggtagactaacaatgcggcagaatgcagcaataatgagtcaacttgatttgtatgttggtgttgataccgggccgacacatttagctggcgcattaggtatcccgatggttgctatgtatcatagtttccacccaggccgttttttggcacctcaacagcattcgcatttggtagttattgaacacccggttcactatatgcaagccacccgcaaagactcgatgtctgcaatatctgttgaacaagtctggcaggcaacgcaaaagttactagaaactcagttgtcaggaagaaaagatgaaaataggtttggttgatgtcacggtaactatgtcttacggtggtattcagacggcagtctgggaactggcgaaagcgttgactgatgccggtcatgagatccatatttttggtggaaagggtgatattcaaccagaactcaatgggagagcaatccaggttcacacttttccattcattcccagagagaaagtcattaatattggtcgacgttttcaacgtattattgaacgttactcatttgctcgccatgctcgcgatacagttgttactgaggattttgactgggttattctgacgaagccatttgattttttctggcctcgaatgatgccaaaagagagccgcactaaattttgctatatgagcggtggcaccagttttttcaagggtgacagaaagctgagtaagcgaatttcagcttgggtggcatgcagccattttaatgcctggcagattcagcaccattttaaacaattcccgaaggtgatttacaatggtgttgatattaataaattcaggccgatagactcttctgtcagaactcgtcttgggatcagtgataaaacatttttgctgacctttgccggccggttggttggctggaaaggcatgcatgtggctattgatgcaatggctcagctacaggataaagatgttaaattgctgattatcgggtcaggtgaagatctgaaacacttagaaaagcgggttgcggtattacggctgaaaaaacagataatttttcatccaccggtaggacatgatcagttgcctgaatattatgctgctggtgatgccgggattttcccaagtattggtgatgaagcatttgggatcacaattgcggaagcgatggcgtgtggccgaccggtaattgcgagttatattggaggcatacctgaagttgtcggcaacgaaaataattcgggtattttagtcacgccaggcgatgcttcagcaattgccgatgcggttaattttttattgtctcaaccggacagggggcaaaaaatgggaaaagcagctcgtcaacggattgaaacaatgtatacctgggagcattcggcaaatcgtttactgaaagcgataaataatgaagattgcctatattgatccctatccggttcctgattatcgggtagcatcattgcaaattttgcagaatgttgatgcgtttgctcgccagggagcctgcgtatatctggttacaccggaaggtaaaaataccgcagaagaggtactggggcgttcattgtcaccatcagcgagactgatatctttacgcaatattcggcgtaaatggtattttccgtttaatacccaaaaaatgttctatttccaggtttcccattggttgaagagaaatgaggtcgatgccgtttttacccgcaatctgaaaatggcaaagtatttattatgtgaacatccagaaattccgctattttttgaaagtcatgagatttttgcccagtcatttaaagaatcgcatgatttaagtaaaaataaaaatcagcgtaaatatcagaagctgagagaaattgaacactttgtttatcgtcggtccaggattactttcgttctgacgtcgttactccgtgatgatattattagtgaatataatgtcagcacgccaatagttgttgcgccagatggcgtggatatgttggcagtcgagtcgatgtcgttagataaacgtgtatcagacgatggtgaattaccaacccagatcctttatttgggcagtttgcatcgttggaaaggtgttccgacggcgatcaaagcgatggcttaccttgaaaatgcagtattgaatattgctggtggtgaaccagggcaaattcagcaattgcggcagattgctcagcaaatgggggttggcgataaaatcaattttcttggttttattcaacctaaattacgttttcagataattgcagataatgatatttgtttgttgccattaacgaaaaccagcatcggcagtcgctatacttcgccactgaaattatttgaatatatggcgatggataagccggtggttatctctgattttctttctattcgtgacgtggctgatgaaaatgcggtcagttttgctgacagtgagaatgcagaaagttttgctcaacagattcagttactgagggataatccagaaaaagttaaatcacaagtcagttatgcaaaaatgttggtgacagaacgttttaattgggaacagcgagcgaagctgattatgcagacaatatcaaaggatatttctgcataataatcggtttaataatatagccgagatatctggttaatcgtttttctgctgatatagcgcaatcatcaggccgaatagaatacctatttcattgatataggtattttcaaaggctcctcgaacgataaataatccgatgaatcccgtcaatagaataatactggcctgctttattacgccattgttacggctaataatgtagctacttgtatacagcgctgagaaggtcatcagcaaagtggtaatcaaaccaatgattccaccggcaaaccagagtgccagcaagatattgtgggggccgatggatgtgcgatatatccagtctggatagtcagcaactcgttcgttgtagactttatgatagactttattgccataaccgtagcctttaatggggttctctagaatcaactcaaaagcagttccttgtgtgccatttttataacgatggctgctatcagtttgagtcagtttccaaaataataacttagtattttcattagcgattattgtagtgtgagaaagcacaactgaaaaactaaggattaaacccactattatggtcagcttccattcccgattaatgatgatgataaaagccgtgatgacggcaatggcgacccaagcgccacgagctaaggtacctaataacaaaaacagactgatagcggaagcagcagccagtatcagccaactcactaaggtatgtttcttccacaatgcccaagtacaaagtaagatcggaaaatagaaaataaaaccgtaagaaaattctcgatggttgaagttggtaaaaggcatttcacctttattgtagttaataatgtatttaccaacatcagttaggcatattgccagcataccaatggcaaatgagtacagaatcatcttggcaatactttctttattttctttgtacagtaccacaggaaaagtaaaactgaacaataatagcccatttaagatgggcttattcatctcttgaaaactcaatgcgggatcgacggaaatcgctactgaatagaacattgctacgatgaataacataatggacagaaaaagtgaattacgcatggagtgcatcacttggcgaaaatctgtcactagataggttagtgctgtaatgccaataagcacgataaccagatttttatatctcgttatatcaggcagataaacaagggctatataaatcccaatgatggataaattccataatgatcttttatcacgacttttaatgttaaacatattcatcaatctgctttcatttctgttgagtttggttggaaataatacatgaaaagattatcttaatctgctcggatgcaatagagttgaaacagtatctataattaggagttattaccatgccagaactaccagaagtagaaaccagccggaggggaatagagccacatctggtagggaatgtgatccagtatgcggtagtcaggaatggtcggttacgttggccggtggcggaagaaattatgaagttgagtgaccagcttgtgcttagcattcaacgccgggccaaatatttgctgattgaattggcaaatggttggattattgtccatttggggatgtcgggcagcttgcgtattttgccagaagagcgccccgcggagaaacacgatcatgtggatttagtgatggcagatggtaaggttttgcgttataccgatcccagacgatttggtgcatggttgtggagtgatgatctcgaacggtgctcggtattggctcatttagggcctgagccactttctgatgattttaatggtttttatctctacacccgatcaagtaataaaaaaaccttgattaaaccttggctcatggataacaaactggttgttggcgttggtaatatctatgcgaatgaagcgttgtttactgcccatattcagccggatcgtcccgcgcagactttaactgagcgtgaagctcatttactggcggaaacgattaagaaggttctacaacgctctattgagcggggtggtacgacactcagagattttctgcaatctgatggtaaaccgggctattttgctcaggaattgtttgtctatggcagagcaggagagccatgtcgaatttgtggtgaacaaatagagagtattaagcttggacagcgcagtactttcttttgccgtcactgtcaatattagttgatatcggatagttcggggaggcgtttcatagggaatattctacttttttgtgccgcctccagtgaacggagtaaattacttgcccagtttttttagcatggcttgggcgataggttctggcaagaatgatgagatatcgccatcgtggagagcgacatctttaatcaaggatgaagataaaaacgagagattttgtgatggcagcagaaaaacgctctctaattcgggcataaagtggcggttcatattggcaagctgccattcatactcaaaatcagatactgaacgaagaccacggataagaatatttgcttgttgtttttttgcaaaattagccattaattcacagaaacctatcacctccacattatccagatgtgaagttacctcttttgccagggtaatgcgttcatccagagtaaacataggattctttctggcactgttggcgatcgcaaatagaacatggtcaaacatatctgcggcgcgggtgacgatatcgatatgaccgtaggtaacaggatcaaatgttccgggataaatggctttggttttcatcaatttttgcccttttgttgtctcttttcccacaatgcaacgtacttattaaacgtatattgagcattgacaatagccaacactaacccttgtttaccatcaagaaagccagctcgcaacagccaggttttaaagaaagccccaaaagtgtgactgaaaattgagaaataactgcactgtttaccttgttcatcgcgctgttctgcccaggctttagcataatttagctgttttctctgaaattccatcaaatcacggcaagtaagatgaagtaaatccccttgcaaaataacgactggagcgccatgagtttcaagggattcatgcacttgattatcattgtattgataacgatcacgggcgtagagacgaatgaccctatctgggtaccagccgctgtgtttcataaagcggccaaggaacaagttccggcgggcacaactgtagactttattgttatcaatatgtgccagagtctgttctatggatgctctgagttctgatgttacgcgttcatcagtatcgatcataaaaatataatcgccagaagcgtattgctgagctagctgacgctgacgaccaaatcccggccagtgagtattggagaatacttttgcgcccattgcccgtgctatctggcaggtatcgtctgagctacccgaatcgagcacgatgatttcatcagcccaacggactgaggtcagacaatctgctatcagatccgctgaattcttagcgatcatgacaacagaaagacgttttttgtcactcattcagtggctccgaggtgggagatagggttccagcagtttaagtagacgttgaagagccccctgattttcatgcagtacttctgctgcgtggcgaccataatacagacgataatcttcgtcagtcagtaaactgttgatctcggtgaataaagagtggctgtccatcacggtaatcagaccattagcctgattcagcttggtgcagatatccttaaagttaaaggtatgagggcccatcagcaccggaatagcatgggctgccgcttctagcgggttgtggccgccacgttcaaccagactgccaccaacaaaagccagatcggcaataccatagagcagcatcagttcccccatcgtatcgccgataacgacctgaatattggcgtcagggattttatcagaactgcgaagaatatagctgagtccggctttctttgttaattcttcagctttaataaaacgttcagggtggcgtggtaccaggatcagcagcaggcttgggcattgtttcagtaacttgcaatgagcatcaagaataatactctcttctccatcatgggtgctggtggctatccagacaggacggtgagccgcccattggcgccgtaatgtcactgccttggctgccaattccggtgttactgagatatcgaatttcaaactacccgtgatagtcagttgagagcgttttagacccagctcaataaaacgttcaccatcttccggattctgggcggcaattaaggtaatgctgcgcaaaattgtttttacgaaactccctactttttgatatccctcagcggaacgggcagacaaacgggcattagcaatgaccagaggaatgttacgttggtgaagttggaaaatcagattaggccaaagttctgtttccataataatgactaactttggattaacttgattgagaaagcgctccatagaaccggggagatcgtatggcaaatagacgtgattaacatcatttcccagagcggaaagcactctttctgagccggttggcgtcatcgtggtcacggtaatcggtaaaaaaggatagtgatggcgcaaggctctgactaaagggatggcggccaacgtttcaccaacggaaacggaatggagcaggatgcctccagaggcaactttaccggcacagaaaccgtagcgttcaccccagcgctgacggtaagcaggggcttggcggctgcggagcaataaacgcaaccaaatcagaggctggataaggtagagaagtacctgatataaacgcagtaacattctatcaaattcacttatataaattagcgtcaatagtatcacattgcggcaaagaaagtatgaaaatgcgtatggcttctaggatctgaacagaattagaaaggtaaattaggatttttgcgtaagatcgtgcttctattatatatgaaggtaaagcggattttctgtagcttctgcacatgttgcggcagttttttcttttatctgtatctttatactgggaatgcaatgagtaaattacaagctcaatttgaccgtattctgataataaagttacgacatcatggtgatgtattattaattacaccggttattaatacccttaaggataattatccggcggtggaaattgatgttttactctacaaagaaaccgaaccaatattggctgattttcctgctgtggctaatctattttctatagatagacaatggaagaaacagggagttaaaacacatcttggtcatgaatggagattgcttaaacgattaaggcatcgtcaatacgacctagttattaatcttactgatcaatggtatagtgcatttgtgacacgatttactggcgcaaaagtgcgtattgggtttgatttagcaaaacgacgcagcctattttggaaaaaatgtttcacaaattttgtgccgacagagcatagtcagtttttgcatattgttgagcagaatttgtcagctctttcgctgttaaatcttccgttaatcaacactacagtgacgatgagttaccgccagcaggataaagaggctgttttgatgcttcttgataagcatggtgtagatcaaaaatatattgttgtgcaaccgacatcccgctggttttttaaatgttgggatgaaaaaaagatgagcaaaacgattaatgcattacagtctgatggttggacaattgttgttacctccgggccagatcgtaaggaggaagagatggtggcgaagattttatcaaattgcctaaaagagagagtgatttcttttgccggccaattaactttgcctcaacttgcagcgctgattgatggggccaatttattcatcgggatggattctgttgctatgcatatggccgctgcgttaaaaacaccgggtatcgctttatttgggccatcaaaattagtattctggcgtccgtgggaagcgaaaggtgaagttatttgggctggtgattatggtgatttacctgatcctgatgatgttgatactaaaacggatatacgttatctgaatgtcattcccagtgagatggttattgccgccgcccggagaaatttattatgaaattagtacgtcttgcgattgtccggcagaaatatcgcccggatggtggtgcagaacgttttgtctcccgcgccttagaggctttagggaatgaaaatttggagcttaacgttatcacgcgttcctggcagggagacgttaatcctgattggcatgttcatttaacaaatcctcataaatgggggcgcatcagccgtgaaagaggatttgccaaagctgccaaaacaatatggcaacaagagcaatttgatcttgttcaaagtcatgaacgtattgccggttgtgatatttatcgtgcgggtgacggcgttcatcagcgctggttacagcagcgtgcgcgtgttttatctccttggcggagtaaattactttttacgagtcgttaccatcgttatgtgatggatgctgagcaaaagatgtattcggcaccggaattaaaaatggttatttgtaactcggaaatggtaaaaagggaggtcatgacggattttgggctttctgaggaaaaaatatcggttatttataattcgatagacaataaacaatttttcccggcaacggaatctcagagaacacaattaaggaaagcgcataaccttcccttgcaagctaaatgtttagtttatgttggttcggggtttgagcgaaagggattaaaagccgcaattcaggcggtgagtgcgactgatgcttatttaatagttgtggggcaggataaagaagagaagaaatataagcagttagctaattcactgggatgtaatgagcgcatcaggtttatgggagtccagaaaaggacattgcctttttatcagcttgcagatggcttgttgctaccgaccttatatgatccgtttccaaatgtgatactggaggcaatggcctgcgggcttccggtaataaccagcatgacatgtggaggcgctgaatttattacctctgggaataacgggtttgtatgtgatgctttggctgtttcagatattacggaagctattcagaatacgccttcggatcatttgaataataaaatgtcagaattagcgagaacaggaatactcggttatacaccggaacatttatcacaacagctcattggattatacgaaagggtgctctcatcatgaagggacatgtattatttatcattgatggattacctggagggggggcggaaaatgtcactatccggctttgtgatggtctgcaacagagaggatatgatgttacgctgctctctttggcagagaaatgtgaatattcaataccgagtggtattgaactgatcattgatgttgatggatacagaggaccttttagaagacagactgagatttgccgtagggctaaatctatggataaggttttagaaaaagtttttcttcgcaagggaattcctaccttgattgtctcaaacttgcataaaactgatcgcatcgtcgtgcaatcaaaagtgttagcggggttaaatgtatggttttgtattcatggcgtattttcaaactcatatcttggtaataagacgggattatcccgctggatcaagaaacaaaaaatcaaatggacatataataatcggaatttaatttgtgtatctgatgctgtagggaaagatttaaagaataatttgttacttacgcctaatgaaatggtgacgatttataatcctttcaacatcccagatattaaagaaaaatcgctgcaaaataacccttattcggatgagacttatttattgcatataggtagattccaccgggttaagcggcatgatcgtttattagaagcatttgcgaaagcagatattccgtgtaagttattgattgttggccatggagatgaagctatcactcaacaaataaaacagaagattgtggatttaaacttacagtctaaagttgttttaacgggattccttgaaaatccattaccggttatccgtggagctaaagcggttgttttgagttctgacagtgaaggattagggaatgtgttaattgaatcgttgatttgtgatactcccattgttagcacgatgtgtcccggcggtgttaatgaaattatggttggtgagctagaaaaatataaatcagagctaacaactgattcactggcagaaaaaatgaagtttatctaccatgaaccgccggtgattacagaggatatgtataagaagtttgatttagatattattttggcaaaatatctatccttaatgaagcggtaagaatggtgatatgtgctttttaagtttagttgttgagataagttaatgaataaaaaaagtcccaaaaattaagagaactgaatagaagaaaaatcaaatttccgaaagatctaatatttcatagtgttttttattgataagattagatacgaaatataggatttaatgagatatagaactgctatatatatgataagataattgcactattttatagatctgcgtactataaaagccattattttattctattgtgggcatattctgatgactcgacctgcatttattatcactattgatactgagggtgatgacctgtggcaaaatcacggtcagatctcgacaaaaaatactcattatttaccgagatttcagcatttatgtgaacgttttggttttaagccagtttggttgacgaactatgaaatggcaatggatgatttatacattgaatttgctaaagatgttattgccagaggacagggggaaattggtatgcatttacatgcctggaataacccaccacttgttcctcttaccgacgatgacatgcgttataaaccttatctgattgaatttccaaaagaacaaattagagccaaaattgatctgatgactaagttattggaagacaaactacagattaaaatgttaagccatcgggcaggtcgttgggcatttaatgaatattatgctgaattgctggtggaatatggttatcaagtcgattgttcagtaacaccacgggttaattggcgttttaccaaaggcgatcctaatggcaacggtggaactgattatcgtcactttccatcttatgcctattttatggatttgcagaatattgctaaagaaggtgactctcctttgctggaagttccgatgagtattcaatataaacaccctccattgatgaatttccttaaacaaaaatatgatagtttacgtgggaaaccgcgttctccatctgttaactggttaagaccaaaagggggcaatttggaacaaatgaaaaaagttgtccaacagacattagcagaaggcagtgattatattgaatttatgctgcattcatctgaatttatgcctggtggtagtccgacatttaaaaatgaacaacagattgaattactttatcaggatcttgaagcattatttaactatttacagccacaggttcgaggaatgacattggctgaatattatcaatggaagcgattatcatagttaagaaaataaaattaacatgatcaaggacattaatagagattcacttaattttgggcagataatactgcctaaattaggtgaagtaggcgcttaccagaaacgcctcagatttaataattaatcagccaatattttcttgaagatgagctaatactttcgatggtgtaatacttttgatattcccatccgccgcttttaacgatatttgttctttgccatagccaccaatgagtcctggatctgtcggaccaaacaacgtgatattagggcgatccagtgcggcagtgagatggctcaagccagtatcaacagaaacaacggcttttgctccggccagctcttgggcgacttgtgccaaagtcagctttggtaatacttccacatgagggaaattttccgctaatctcagcgcacgttggtattcatgttctgcgccccaagggagcttaattttcatacctgttggctgaatttcagcaataagttgtcgccaatggctttccggccaatgtttttcatcgcgcgtggtggcatggagaaaaaccagataatcaccctgattttctagtttctgctttaaaaagtgacgggcaatcccataatcaccctgtgctgccagtttggtataacccaagctgacagcaaacagttctcggatgcgctctacagcgtgctgttgcttgctgaccgtatgacggcaatcataaaaaaaactcgctaatggctcacggatacttttgcggtcgtaaccatgtttaggaccataagcgagtcgggttaccagaaatgcgctttttaataacccttgagcatcgatgatggcatcatattgatgtaattttaatttttctttgaataaacgacgttctgcacgaatttctgggctaaaccagtttttacgccagcggcgaatagcaacaggaataatttgatcaaccgcattgtgccaaccggggatttgagcaaaaccttcctctactacccaatcaaaacggacatcaggtaagtttctttctgcatcagtcagtgcagggagcgagtggaggacatcgcccatagaagaagttttgaccaataaaacccgcattaactctggttctccgcttgtaataatttttctagagaagtgataacttgttctggttgaatatcgatcaggctctgatgatagccatgtgaactgtcaccttttctgactttgtgataaccagtaataagacggataacttccgctttatcggataatggtggagtaaaatctgggctacttgggccgtaaagtgcaaccagagggcgattaagtgctgcggcaacatgcatcaaaccggaatcgttggtcacaatagcatcacaggccgcgataatattgactgcctgttcaagagaagtttgtccggcaagattgatacagtgttcacgagcttctcccgtcagtgagttgcggatatcctctccaccttcgtgatctttggcagagccaaatagcagaatttgatatcccttttgagtaataagctgctgagctaatgcggcatagtgataatgcggccagcgttttgccgggccaaattctgcgccggggcagaaaccgatgataggccgatgatcagaaatattgaatgctgcggtggattcagcaatatcttcatcactgacatccagttgaggccaaagtaatggttgaggcagatctgccgcactactgggttttgcatcgtaagccaatgcggcatagcgttgaaccattaatgggaaggcttctttattcaatgtacgaatatcattaagcaatccatatctcatttcaccgcgccagccagtgcgcagaggaatattggcgaagaaaggcaccaaggcagatttaaaagaatttggtagcacataagcgcgatgatatttacgttcacgcagggcgacccccaaacggcggcgttcgcccaatgccagtgcgccatgtcctaatggcatagctaatgcttgattgacctccggcattttatccagcagtgggcggcaccaggcgggggccatcacatcaatttctgcattaggatgcaaagcctttaatgtccggtaaaggctctgcgacatcatcatgtcacccacccacgaagggccgatcaccaatattttcatagtgagtagattacttatcctgattgagccaatgcatatattccgttaccccttcggcaacggttttgaatggcttatcataacccgccgcgcgaagtttggtcagatctgcttgcgtgaagcgctgataacgacctttcagatgttcagggaaatcaatatgttcaacagtgagtgatttatctttatggcattcaacaactgcatctgcaaccgcttggaaagattcagcacgacccgttccacagttataaataccggaaacgccatttttccagaaccaaagattaaccgcagcggcatcaccaacatagataaaatcacgttgaaagccttcactgccggcgaataatttggggttttgtctctgattgatttgattattcaaatgaaaggcaacgctagccatactccctttgtgcccttcacgtggtccatacacattgaaataacggaaaccacaaatttgtgaatcagcttgaggcaagatttcccggacatattggtcgaacagaaacttagagtaaccataaacattgagtggcttctcatattgacgctcttcgataaaattatccgtgcggccgccataggttgctgctgaggaggcgtacaggaaaggagtgcggcgttcaaggcaatagtgcagcaattctttggaatattgatagttattatccatcatatatttgccatcccactcggttgtggatgaacaagcgccttcatggaaaatagcgtcaatatcaccgaagtcatcaccggccagaatactggcaataaactcttccttgtccatgtaatcagcaatatccaagtcagccagattgatgaacttagtaccatcttttagattatctacgaccagaatatctttatatccttcgtcatttagtgctttgacaatattgctaccaataaatccagcaccgccagtgacaataatcatccgactcacctctacaatcgggttaatgaagcaaattgcttctataataacatctaacatccgtgacgacagcagcttaagcaggggaatatactgaaatattatggtaattcagattgcatgacgtgacggatacagcaaagttaatattatctgcctgatagtgtcgtcagtagcttgatcaatgagtaaaatatctcacaacccttcatttataaatcaggagaaaaataaatgtcagcgtcattttatcagcaaattaatgaacaattagaacaagcccattctgaaggattgttcaaaaatgaacgtatcatcacctctgcacaaaatgctgacattgctgtagccgatggcagccacgttattaacttctgcgcaaataactacttaggtttggctaatcaccctgagcttattgccgcggctaaagcaggaatggatagccacggttttggtatggcatctgttcgttttatttgtggaactcaggatactcataaagcgctggagagaaaactggcagaatttttgggtatggaagatgctattctttattcttcttgttttgatgctaatggtggtttatttgaaacgctatttgggccggaagatgccattatctctgatgcgttgaatcatgcttctattattgatggtgtccgtttatgcaaagcgaagcgttatcgctatgctaataatgatatgcaggaactgagagcacaattagagaaagcgaaagcagataatgcacgccatattgtgattgcaaccgatggtgtgttctcgatggatggtgtgattgctgatttgaagtctatctgtgatctggctgatgaatttgatgcaatggtcatggtggatgactcccatgctgttggttttgttggtgctcatggccgtggtactcacgaatattgtgacgtcatggatcgcattgacatcattaccggcacattaggtaaagcgttgggtggtgcttccggtggctataccgcggcacgtaaagaagttgttgagtggctgcgccagcgctcacgcccatatctgttctctaactcactggctccggcgattgtcgcggcatccattaaggtgttggatatgctgaaagagggagatgcattgcgtgatcgtctgtggaagaacgctaacctgttccgtgaaaaaatgacagccgcaggtttcactttggcgggggctgaccatgcgattattccggtcatgttaggtgatgcgaaattggcacaggagtttgccgcagaattactgaaagaaggcatttatgttactggtttcttctatccggtagtccctaaaaatcaggcccgtatccgcacgcaaatgtcagcagcgcatacggaagagcaaattgaacgtgcagttgcagcgttcacgcgaattggtaagcaattaaatgtaattgcataaggcatctctatgaaagcattgtcaaagttaaaagcagaagaaggcatctggatgatcgatgtgcccgagccagagctggggcacaatgatgtgatgatcaaaatccgtaaaacagcgatttgtggtacggatgtgcacatctataactgggatgattggtcacaaaaaaccattcctgtaccgatggttgtcggtcatgaatatgttggtgaagttgttgccattggtcaggaagtaaaaggttttaaaattggtgatcgggtgtctggcgaagggcatattacttgtggttactgccgtaactgtcgtggtggccgtactcacttatgccgtaataccattggcgtaggggtaaaccgcgctggttgttttgcacaatatctggttattcctgcatttaatgcgttcaaaattccagataacatctctgatgaactggctgctatttttgacccatttggcaatgctgttcataccgcgctttcgtttgatctggttggtgaagatgtgctggtttctggtgctggcccaattggtattatggcggcggcagtatgtaaacatgttggcgcgcgtcatgttgtcatcaccgacgttaacgaatatcgccttgagttggcacgtaaaatgggtgtcacccgtgcggtgaacgttagtcaggaaaatctgaccgatgtcatggcggaattgggcatgacggaaggttttgatgttggtttggaaatgtctggtgccccggcggcgtttcgtaccttattaaataccatgaatcacggcggccgtgttgcattgttgggcattcctccatcagatatggcaattgattggaatcaggtgatttttaagggattgtttatcaaaggtatttatggccgtgagatgtttgaaacctggtacaaaatggctacattaatccagtctggtttggatctgacacccattatcacccaccggttctctatcgatgatttccagaaaggctttgacatcatgcgttcagggcagtctggtaaagttattctgaactgggattaatcagtaaagttactactaagattgacaggcgttttcagttttcttgagcgcctgtctaattctatgacactatacccgtcatctttcaagttgcctctttgttggctgcactcgctcaccccggtcacatagttatctatgctcccggggattcactcctttgccgccgcgatgcatcttgaaatccatagggtatatatcctgtgtaaataagtattcactaatctgactttgagtggatggcagattataagcaaattttatttctctttaaccaacctgaagaaattaaaatttaaacgtcattgcggcaaagaccattccaccactaccagcccatcccatacaaagttgatttttttccaatataccttgattaatggcatcgaatattccgaacgggatagatgctgtagcaatattacctacccgttggccaacatgatgtatcttgtcgtcaatacccatcttctgaccaaggcgtgcccacgtttttggtgaacctgtatgaataaaaatatgttcgatatcgtcagatattttgtgatgattaaatagattaatagtctctttctctccatgatcgtgcagtagtgccgagtgggagttcacttgatatttcccgcctgtaggcccaatacgttcaacgtctgtatcattgcagaatagcctccagtctggcagtgaaattgttgataagtcgcttaagtctgggcgattgatataattaaatttgaagttttcaggcgattcattactaataatagtgacggttgctgcctctccgactgtgcaacctatgaatttataagctacttctgacaaggagtttagggaaaaagtctttggaaaaattggtccattttgggacataataaactccatattaacaatagcggcatggcgtatttcaccagctttcattttgctattgataatatccatagctgccacccaaccgttacaggcgtctacaacatcgtagttcctacaagttagccctagtgcctttgagacaaaagtactgttagctggttctatgaagccgcgggcaacactggaatagatcagtaaatcgatatcttccttaatgatattggcttgtgctaaggcatgattaaatgcggcctcaatgagttccataggtttctcgttatctgccaaccaataccgggaatttatacctgctttattaagcatttttccgattagcttcaatgtcttgggcaaatcaccatggaaaatttcttttgaataatattcaactaaatcaataacctcttgattagagacgaatcgggaaggaagtaatccggctatgcctgttattttcataaaatgctctctcaaatgaatataatatttttaaaacctacttagaggtattataaactctgaacttaatttatcatttatgtatattgctcatgaaaatatataatttatttcttgacgacattaatggggtgaaagttaaacatcaccatgggaaaaatttagattaattatttaatgttgaaatattaaatacacttaatgatacattaattacaatatgtgttgatttattctaagtaaaaatattgattgtgaaaagtgtacactattaaattaaccatttatctgggtaaaaatcaattcaaaccaaagtgagatagttaaaattgaatatttttaggtatggtggaaatgtaaaaacatacaactgatcacattcttaattattaatgacatgaagttgtttaaattagttacaattttttttgttacaatgcatccggaagaaataaatagtgtataattcatttcgtgtatttaatcttactatcaatgatgaaatatttatataaccaaatcatctcttaagaatggaactaaaatacctgaagtataaataaaatttatttttctgaataattattaagaaaaaacagatttgaatgctgtcgacacataaataaaaataacgtgtattaacccaccttttaatatgaatttctattctgttttatcctgaggtttatcgccggtcagtttctggatatattggctcaccgtgttcacaatgggattatcaaccagagtatcgccgataactgtcaaataatcttggctggtaactgtagcgggtgcctcttttattcttccaaatgaaaggttaaaaccaccggctttagccggtcagctttagctgcgatactgtgttgtaccggaggtgcaacatggattacagatatggcagccacacggtatttcagattgaataccattttgtgtgggtaacgaaatacagatacaaagtgctgacaggagaagtggcaagtcgagtgcgagaattaatccgtcagacatgcggctcctttgaaatcagaatattaaagggagttgtgagtcaagatcacgtgcatatactcgtcagcagtcccccaacattagcgccaagtgaaatcatgagaaggctgaaggggagaacggccagtaagctgtttgaagaattttcgcatttgaaaaagcggtactggggccaacatttttgggggcgaggctatttttgtgcaacggtggggcagttaacggaggaaatgatcaaaagctatttagaacatcattttgaacccaatccgaatgataatttcaggatggataattgacgcgtcgtttagccgacgcgtatccggactttcagtccgttaatcactaacccaccgactttagtcggtggttgttgagttcacacagcttgccccatttatgtgggttatcaccaacaggtttgccacttaacaacctacttgggctgactaactcaatatcagcgggaagcgttggcagcatctgttgtaatgcacgaatggttgttgaatgaggatgaccgatagcaatagcggaaccattcttacgggcaatggaaatcgcacggtttaactgatgacgagtttccgcttctgattgcacatcatctaggaaaacattacggcggataacgcgaacaggtgtgccttgtgctgcctttgttgcttgagtattgccaatcgtcacgctgtcgagaaaatagaggttataaccagacagtgaacgcatcactttctgcattcccggcaagctcgaagtcatagcgctgcccatatggttattgattcctacagcataaggaactttttgtattgcacgctggatgatgcggtcaatatcttcactgctcatggttggctggagagtatccggttctagcagttgcttacttaaaggtgccattggcaggtggattaagatctcccgcccttgtttataggctttttcagccatctccctgccatgcggtgaatccggcagaatggcgatagagattgcaacaggcatctgcaatattttgttttcattatgaggacggtagccaaaatcatcgataacaatagccaaacgggcagcaccggtttgtaggctcaaaagtaacagggcggtagtaccaatgagttttgcgagtttgcgttgtctcacctgattatctcccaagccacggttgtgggtttactgctcttccctgacggcggatttcaaaatagagtgcgggttgttgctgaccgccactgttaccgaccaatgcaataggttgtccggcacgaacttgctggccgacactgaccagagcactctgattatagccatagagactcatatcacctttaccgtgctcgataacgacaaccagcccatagccttgcaaccagtcagccagtaaaacccgaccatcagatatcgctttgacttccgtaccttctgtggctgaaatcaccatgcctttccagcgtaattcgccttgcagcgcttcaccaaactgatgtatcaccttaccgtggaccggccagattgcctgaccagccggacggccaaggccaccggtacgcgccatcaatgcgcgctcatcctcagttggcttgtagcttgaacctttttgctgtgcttgcttctgttttgcggcaatctgggcacggacgcgggctgcttctctggcttctcgttcagcacgtgctttcgcttcccgttctgccttggcaattttatctcgcagacgggtttcattttgttttagttcagcgagatttttctgatctttctttaaggaagattccagttcagacaacgttttttgccgagcgttgcgggccacttccatctgctgtttctgctgctgctgttcagtcagcacttgtttctgctcttcctgtttctgctgctcaagctttttctgttcagttaaatcaaccgctgtttgttcaagtttaacaatggtgtcctggcgggcttgattaaggtagctatagtaagcgagtatacgttctcctctcttaccctcctctcctctgaacatgagttcgagcccttgatattgcccttgacgaaatgctgcatctaattggcgtgccagcatatctcgttgcgctttttgttgtttttccagttttttaatgttggagactagaaaggtaatctctttattcagcttactgagttgagtttgggcgttgtgtagagattgcccaattttggaaatggtattttcctgatctttcagttgatttagcaaagaactacgtttttgctgttgttgttgcacgctcttctctttctccgcgatgttttgttggagatctttcaactgatttttattgtcgataatttgattcgcaaaggtattaaagctaaaaataaccaataggaaaacatagaacaataaggcaaagatatcattccgccgtgagttctgattgcgccgataattacggctatgcatttccttgtcgtcagccatttctgtaaatataccttgctactatgtgcgttagattatttcatgatgaacaaagagttaccagatgctacgctgattttttacactttcagataatgctgtcttaacatcgaaatcgaatatacccgttatctttcaagttgcctttttgttggctgcactcgctcaccccggtcacatagttatctatacccgtcatctttcaagttgcttctttgttggctgcactcactcaccccggtcacatcgttatctatgctcccggggattcgctcccttgccgccgcgatgcatcttgaaatccatagggtataaatataaacatattagcctacttaccgttgaaattcctgcatgcatccagtgtgacagaacatatgctggtaatgtacttaagatgcttcattttcaggatatttttattttttctcgaaactctccgcaaaatttgcattgagcttatgctatttggctgtaattgacgcaacacaaaggtatactctggaatcttagatatttgttattaaccaacgggagttgttgcccccatgctgcaagaaatcatgcaatttattaaccagcatatgaccttaagcctcatttggattgcgctgctggttgctgttattgtgacgacaacgagaggtttcttctctaaaaccaaagagataactcgtgctcaagctattaatctgatcaataaagaagaagccatcgtcgtggatttacgttcccgtgaagatttccgcaaagggcatattattggtgcagtaaacctgactccctctgaaattaaagacaacaattttgctgagttggaaaaacataaaaagcagcctgtaattgttgtttctgcgaatggcactgaatctcgtactccggcagagaatcttcttcgtgctggttttgaacgcgtatgttccttgaaagaaggtttggttggttggacaggcgaaaatttgccattggcacgtggtaaaaagtaatcattttgggcgtgaatggcgacattcacatgaaaaatttaataaggacatctaaaggtaacaattattatgtcagaacaaagcaatacagaaatggctttccagatccaacgtatctacaccaaagatatctcttttgaagcaccgaacgcaccgcaagtgtttcagcaggaatggcagccggaagtaaaactggatctggataccgcttccagtgagttggctcaaggggtttatgaagttgttctgcgtgtgactgtgaccgcagctttgggagaagagacggcattcctgtgtgaagtacagcaagggggtattttctctattgacggtattgaaggaactcagttagctcactgcttgggggcatattgtccgaatatcctgttcccgtatgctcgtgagtgcatcactagcttggtcagccgtggtaccttcccacagctgaatctggctccagtaaactttgacgccctattcatgaactacctgcaacagcaggcagaacagtctcagggtggtgaacaaactgaacaggaagcttaatgaatagtactgtttctatgacagtgattggtgccggctcatacggcacctcattagccattacgctggctcgtaatggtcataatgttgtactttgggggcataatccagagcatgttggggcattgcaacgggtgcgttgtaatcaaaaatttctgccggatgtttcctttcctgatagtttattgcttgaaacggacctaataaaagcactaacagcgagccgcgatattcttgttgtggtacctagccatgtgtttggtgaagtgttaaagcagataaaaccacatttacggcctgattcacgtatcgtatgggcaactaaaggcttggaagcggataccggtcggttattgcaggatgtggcccgtgagatattaggcaatgaaataccgctagcggtgctctctgggccaacatttgctaaagagttagcggctggtttgcctaccgcgattgctatttccgcgacggaatctgcttttggcgatggacttcaacaattattccactgtggcaaaagtttccgggtttataaaaatcctgattttattggtgttcaactcggtggtgccgtaaaaaacgtgatcgccattggcgcgggaatatctgatggcatgggatttggtgctaatgctcgtaccgcattgattactcgtggattggcggaaatgagtcgccttggtgcagcgcttggtgctgatccttctacctttatgggcatggcgggattgggcgatttggtcttaacttgtactgataaccaatcacgtaaccgtcgttttggcatgatgctggggcagggaatcagtgttgaagaagcgcagtatcagattgggcaggttgttgaaggttatcgcaataccaaagaagtacgtgcattggctaatcgcgccaatgtagaaatgccgattgcagaacaaatctaccagatactctattgcaataaaaatgtgatagaagctgctcaggcattattaggaagagccagaaaggatgagagcgataatgtgcgctcttaaataaaaatctaatgagataggttctaatgtgagagtaaaaaatatgtcgctagaagaattggacgaagtttggaagaacataaaaacagaagcgagagcactggctgaatgtgaaccgatgttggccagtttttttcatgcaacattactcaagcatgaaaatcttggtagtgctttaagttatatgctggcgaataagctggctacgccgattatgccggctattgctgttagagagatcgtagaagaggcttatggctcggatcaaaaaatgattgtctctgctgcccgcgacatcatagcggtacgtctacgcgatcccgccgtagataaatactcaacacctctgctgtacctcaaagggtttcatgctctccaagcctatcgtattgcccattggatctggggagaagaccgtaaagcattggctatttatctgcaaaaccaaatctcgatgtcttttggcgttgatattcacccggcagcaaagattggttgtggcattatgcttgaccacgccactggcattgtgattggcgaaacggcggtagtggaaaatgacgtttctatcctgcaatccgtcacccttggtggtacgggtaaaaccgggggtgatcgtcatccgaaagtcagggaaggggtgatgattggtgcaggttcgaaaatattgggtaatattgaaattggtcgtggggctaaaattggcgcaggttcagttgtccttcgctctgttccaccgcacacaacagccgctggagtgcctgcccgtattgtcggtaaacctgaaagcgaaaagccatcattggatatgaaccagcattttaatggtatcaaccatggctttgagtatggggatgggatttaatttatcgaaatctggataattagtgaacgctatcatattttcacatgctgaatgtggaaatatgatctggcatgcttaacgtgtgaaatcttctataccctatggatttcaagatgcatcgcggcggcaagggagcgaatccccgggagcatagataactatgtgactggggtgagtgagtgcagccaacaaggaggcaacttgaaagatgacgggtatataaattatttttttgctacacctattataatatagtgccaatgcttaggaatgactttatttagaactttattatctaacacccctaaaaattttctttgaaattcattcctaccaagcgtagcaaggaagcctaatgttgtataattaacatctgaaaatgctgataaatactctgtcatttccttggtggtaacatagccccaagtatttccccaattaacataatttttcctgaggaatttatgcaatggtgatgcaaccagattttctgcaaaccaaagttcacctccttcctttaatgaataaaagatttgattaatagcctctttttgtgctgttttattgaaattataaccgacagcacctaatactgatttaaacataacaatatcaaaatggttcttatatttaatatccgatgcgtttaatttatcatactgaatgctcttttctatattataacgcttatgtttctccagtgcttttggcgtagggccatctaaatcagtacataagacatttgctccattcaatgctgcccataatgataacccaccatttcgactacctagctctagaatattagctgactttaattctaatccagaatgatcttgccaatattttaacgaatgactccaattatatatatcccattctatgacatcatggagaaattcttttgaattttttgctttcatagtgtaaccaatatatatcaatgaaaatgagttattttaatactaactttattaaattattatgatctaaatagttttatcaaatagtagatcatttgagggaatcaaccccgatataagttatatgaatcaattttcaaagagaaaaaattccccaatagggttaggttatactaatcatagcacctacgtcctgtaatgaatgatgatttagcgcaaaacttattcagaaaatccaggaaaaaactatgcccttgatgtcttactgttttcctaacgacacatcatggacattcggtcacttacattgccaaaacctgttgcttttgcccatctttggtcgaatgcgatatgggagtacagagctgataaccatcgtggccgtaccatgcttcatccgagaacatgacaaaatggttatctgattctcatcgtgggtctggtgcagagcggttcctaaactgcattgctgtgacccacgcaaagaagaaaaaattaccgtgatatggtcaataacacattgaaccattgcaggaatgtgtagcgatattaggcattattggcacactattctctgatgatagcgccctgataatctagttgccgccaggcttcaaaaacaacaacagccactgaattggaaagattcatactgcgactgtttgctagcattgggatacgaattttttgttgtggtggcatattatccaatacataaggtggtaaccctctggtttccggcccaaacatcaaataatcgcctgcttgataacttacagcactatgtgccggagttccttttgttgtgagagcaaacaaacgagcagaagatgctcctgttaatccttcattctctaaaaaagcaaaataatcatgatgttgcttaatattggcaaactcatggtaatccagcccggctcgacgtagccttttgtcatcccaggtaaaacctaggggctgaatcagatgcaattgaaatccggtattagcacaaaggcgaataatattaccggtattcggtgggatttcaggttcaaataagacgatgtttagcataaagccccccagaaacaaggggcacagattagcagaaatcaggaggggatgcagggggatcttcatcgatattcttatttatctattagaagatctttccttgttggggggactcgcttgtattgtcagtaaacttaaaaatgaaaaaacatcactggatataacctaacagactaaattttttagagactctctggattacttttttgccacaccgatgataatatagtgccaatgtttaggaacgaccttatttagaactttattatctaacattcctaaaaattttctttgagattcattcctgccaaacgtagcaaggaaacctaaagttgtataattaatatttgaaaatgcagacagatactcgaccatttcattgacggtaacatagccccaggcatttccccaattaacataattttttctgagaaactgatgcaatggcgatgcaaccaaattttctgcaaaccaaaactccccccctttttttaatgaatgaaaaatctgattaattgcctttttttgtgcagatttatttgaattataaccgataccgcctaatactgatttaaacataacgatatcaaaatggttcttatatttaatgtctaatgcacttaatttaccatatcgaatactgctttctatattatagcgcttatgtttctcctgagcctttgaagtagggccatttagatccgtacataaaacattacctccatttaatgctgcccacagtgataatccaccatttcggcttcctagttctagaatattagctgactttaattctagattagaatggtcctgccaatattttaacgcatgactccaattacctatatcccactctattacatcattgagtagctctcttgagttctctgttttcataaaaaaggaccaatagactaattattttaataatacttttatagtgaattattatggtctagtgatagattattttttaatgatggtattttaggaaaagattacgggagggcttgcttagcaagaatttcagatagataggctgtactcatcgttgctttcgtgtctatcttatcttaaatatttttgtattattcagtatattcactgcaatatgttttatccgagatagtaattccgctgaattgttgcgccgaattgggagcgcctgacggtttttccatctgtggcactccctgagcttttcatcagttcacggcaaatattcatccatttaatgaaatacttttgaaacagcttggtgctgatacagctaaccatatggactatggtgtcatgggttgtaataccctgttcaaatttaccgtattgctttaacaatcctcgactgctcaacaccaaaaccttcaatttcttcccagcctttggtgccacaataacgtcacaattgttaacggcagaatatctgccagctcatagttatttgctattctgactaggattgtgagtaatcgagtagttgctaagtcaatcgtaaaaaggcttttagcgttatttccctgagcgaaaaccatgagggttattcttttgccaattccaactatcacgcatcatatcgtcaatattgcgtgttgcttgccaaccaaggatattccgagctctggatggatcagaccaacactcagcaatatccccaggacgtctatctgtaattttatatggaatatctttacctgacgccttttcaaaagcatgaagtagttcgagtacagaataaccagcacctgttcctaaattaaaaacttcataggattgttgtttatccagatagtcaattgcagcaatatggccttcagccaaatccatcacatgaatatagtcacgaataccggtgccgtctttggttggataatcattgccatacactgataaacattccagacgaccaatagcaacctgagtgatataaggtaacaggttattgggaataccattaggatcttcgccaatcatacctgatgagtgtgcaccaacaggattgaaatatctcaggctggtgattttgaaacttggctcggcagcggcaaaatcttttagaatttgctcaaccatcagtttagaagtgccataagggttagttgtaccaccaactttagcattttcagtaagtggtacaaattcaggatcaccataaaccgttgcggatgaactgaaaatcagttgatgtacactgttggcacgcatagcctgcaacagaactagggtgccagtaacattgttctgataatattcaagtggttttctagtggattcgccgactgcttttaatccggcaaaatgaataacggtttcaattttattttcctggaaaattttatgcaataaatccaaattgaggatatcaccttgataaaacttcactgatttaccagtaagtttctcaactctacgaagagattctggtgatgaattgcaaaggttatcaataacaacaacatcagctcctcgttccagaagcgttaatactgtgtgtgaaccgatgtagccggctccgccggtgattaggattggcatttaaatattcttgtgcactttattagttatttgtaagttcatgataatctaacctatccaatatagtctcttatcatcccaagtaaaatttagcgttaaaacagatatagccgaaatctagtattatcacaaaggagaataatattactggtgttagggaggatttcaggttcaaataagactgtgcttagcatagtatattatataccaacttttaatctttcgtcttcagtcaagtattcaacaagacatttataatgcatgtcttttgttaatatatttgcacctttttctatcaatagctttattattctagtatccccattttttaaagcatattcttttgcatacattagaactgaagttcctttatagttagtagcattaacattagcgccagaatctatcagatattttactatgcctaaataaccatgataagaggctaccatcaacaatgaccaagtatgctggttacgttcatcaattccagatatgtttttaatatatttctttatttcagaaagattgttttttttacaaaaatcaaataataaatcaatcttatccttatatagtattatattataatcaatagttgagaattcagaaaaattttcattatctttaatgagagctcctggtctaccagaagaacgtattgatgttatttcataattgcagtaattagtattttgatagtgaggtaattgatattctctaaaagagaatgctcttatatatctacctatttcccatgctgttttatgtaaattaatgctttctgatgaaaaagaaattgtatttttagaatagtaagatgaatgctttgatttttgagggttgctaaaaatattattattttttattattttttctatataatcttcaattaaagtgcaggaatgagaaatatagtttaaataaatatcctttgatgtatacctttcatctatattaatagttgtttggtcaattatttcacctgtatctattccattgtctatataatgtaaactaacgccagtagaaatctcattattcaatattggccatatggatgtatacatccctttgtattttggcagtagagaaaaatgaatattaaatatcttcttagttctgaatcttccaattttaataagttgatcaaattctagagataagaagatagaagcatttctttctgcttcttctagtgaaataataggtacattgatttcatttgctctttttttaagagaatattgccaggtattattgcctgagtctgtcttattaattacaactgctaagttttttatattatatttaatttttaataaatttagaacatgaactgcaatgttatttttcccagcaataacaatcacttgtgctacctataaattaagtgtgaaataattaagtttagattaaataagttcgtatccctttaaatagtttatttggagttttgccaccactagtctttcgggagtgattatttgatctgtttatgataaatcttatctctcgttcagagattttattaaagtttatcccttttggaaaatattgtctgaattagcttatttatattttcatttatttctctttctcccgaggagtataaagattggaaaagtaaatcgttgtatctaactattcactaatcattttatgactcccaaattctaaaccgttatcaaacatcattgttttaaccctttgctttaaatggctataaagctttcacggtggcttccgttacttttgatgcttgttttttattcagtttgaaaatgattatatagagcgttttacgttcaatcagcgttaataatacacttttttatcttttctaattattgtatcaccttcccagtcaccaatccgagcttgtttatcaacgacttctgggggttcattaatactgactttttttaatttttcctcttctttcataacggccgtatcgtttacgatacgatttaatggtaattctgagatgctgccataagtcacctccatccattttgtctttataagtcaatctataaatggtctcatgatataaggatgtccctttatactttctgaaatagtcaaccgcctgttcagaattgaaatcttgcaagattagccgctttatccatttttttatttctttgatcatttttgtggatttcttggtagaatgacggcgagaaagcccctgaagatgggcttgctccgggcaatattcttttatttcttgatttcttttcaactccctgctaatggttgataggcttcgattgagtgattgagcagtgaaacgtcgtgaaaaaccgtttttttaactggaaatctggtatcttcctgctttgaccagttttttataggccatagtgtattatatgaacgcatcctgtttgcaagggcatccgtgattctgacttcgacggtaggttgcagctttatatccggctttattgctgcttgatagctagcgagcctctatgtcattcgctgactcacatctcattttcctgcgggctttaagcccatagcactattcatgtttagtaagtcacggtcttacctgtctttgtcatcgctatggccgccagagcaacctttcctcattcactctgattcttaagcgtgaatgtttgtcagttgtagccgctaatacggcctgacactgacgtaatttttgtcatatctgctgtgatgagctgtcattgcccagactgttcgggctaatttgtttgccaccagtgaggctgctcttgccccgtggataaacagcgttcgcaggtaggtgtatttatcccgagtaggtgaatttcatcgccagacccagtttatttcgagactaggccgataaaagcagcgaactcacggccggatttaaacgctgacgcttcgtccatcgtagcgacggcagcggtggcaatgagggggttaatcccggggattgccagtaatcgctgacaggttttattctgcttcgccacagccgacagttgtttttcaatatcatcgtcaatatgagcatccagatcagcaagacgctggtactgctcatcaagcaggcttatcaggtacgtaggtaaccatgttcccaaacgttccagagtgtctgggagttccttagctagagcggctctgcccttatggagagtttcgccaaattcaggcaacatgctgtgtagtgcatttatctgtgcggttctgaacttcaccagttgctggcgcatccgatgaagcgtcagtatggattgctgttcttctgttttgacggcaacggattttacgggttgctgaactgacatctagatagcccgggcatccatcacatcattcttgttgcccatcacaaatgtcttaacgaattttcccttgagcaatctgacttgatgtcccagcttctgaagctcacgcgctcagtgctgagcacctccgcacgcttccagccgataagacagggtttccgatgacctgaaatagatcaggaatgcctcccgtctaatttgcttgtcaacaatttcaccggtgttctcatcaatgaagtgcgcctgtataagatgttttgcaatatcgatgcctacaggagtatattccatcttgtggtttccctagtcagcagggagctttatgcaccccgtattgctgccttactcaattaatttagatatcgtaaacaaattgtttgaaaggattgcattctcagtcggctcagatgttggatgtccagtttttactaaaaaacatcgaggaattccggcacgttctccagcatgtatatcagagtttttatcacctactaatatagagcttttgatatcgatggaatatttttttctagcttgctctatcataccaggtgaaggttttctacaataacaatcctttgataactctgggacaataccatcagggtaatgaggacaatggaatatatctaaaatatcaactcctttttcttttaaatcatttctataccaatcagttaataattgatattgtttctcagaataatagccgcgagcaattccagcctgattagtaatgatgataatttcatatcctaaatcacgaattttttttagcccaactatacatttagaagtatattcaaaatcttcaatcttatgcagatagttgacctccttattaataactccatctctatctaaaaaagcaacttttattttattgtgttgcatgctttataataatcctctggaattcctatatcaataaagtaaccattagacacaaatgccttaaaaataccgttaaagtttttgatgaaatcattttcgaaagaaaatttttctaaaggaaaatttcttattaaatcttttttaattaaatagataccactatttataatacctttaccagttagtcctttttctagcatagctaaaacattattgtattcatctaatttcaaagttccataacgtgaaacatcgtctatatatacaccacttataactaaatctgcatcattcgaaaaattaattattgaattataattaatttctgacatggtatcgccattcaaaactaaaaatttggatgaatttatttttgagctagcaagcttaattgctcctccagtacctaaaggagtttcttctatgacgaaatcaacttcacatgatactggttggtctttttgtatgcatccaataatgtaatcagcttgatagcagagagaaagaactatttttgaacaaccttgctcttcaagccttttcattaagcgataaaggaaaggtttaccatttatatctaccataggcttaggtaaatcaccagttacggcttttaatcgagccccttgcccaccggctaaaattatcgcctcaaacataatttataatttctctttaggaaaaatttttgcttctacaatggcgcaaatcatatgaccaatacaaatatggcattcttgaatatatggtgttacagaatcaggtacgcaaattgctatatctgccaaatcttttagttttccgcctgagccacataagactacagaagtaacaccttcttcttttgcaacttcaatagcttttattatattcagagagttgcccgaagtactaatgccaataaaaatatcacctagtctgctttgagcctgtagttggcgggcaaacagtttatcaaatccataatcgttgccgatagcagttaacatggatgagtcggtagtcattgcaattgcaggtaatcctggtcgatcataaaagaagcgactcacaaattctgcggcaatatgctgagagtcggcagcactaccaccatttcctgcgagtaaaactttattattttttgtgtaagcatcaactattagattagcaacatcagaaatggcttttaaggttactatatcatcagctaacttttgttttactttaatcgaatttaataggtaagtattaatgtaatctaaattgtccatgagtaggctccttcattagtaaattggaatttatgcacatgtccgtcaaattgctccaatgctttaatgacatcgagtttattttcgggctcaacaaatatcatcataaatccaccaccgcccgcgccagagatcttcattgagatggctcctgcattaagaattgaggattcaacagcatcgattaaagcattagaaattgatggggatgtcgctttctttgactcccacgcattgcgaaactcctgcgctacaccaaggatatctgctttaaaaagtagttctttaattttgtatgcagattctttcactttgtgcattgcatctaatcgagctccgttatctttcttaatagatttgatctggtcgtcgattatctttgcagaatctcttgaagtgccagtaaaaaacaaaattaatgaagattctagctcactaataatatagcgacgcattctcagagggtttacgataacgcgatcatttgcataaaattctataaagttaaagccaccaaaagtagctgcatactggtcttgcttaccaccagatagtttacagtctcgtctttctatttcgtatgcaagttgagcgatatcatattcccccagtggtagggaaagcagttgacggaatccttcaagcatagcaactaccatggtggatgaagaacccaagccactgcctggaggtgcatccgactgtgtagtcagtcttagaggtatatacttgcccttgttatattgttccataatgcgcttatatacagctcgatgaagtaccaaatttccatctaaagagacgtcattatctaactcaatgatatctattattccaagatctttcgcttcaaaaataacttggttgcctttgatatcatcatctataaacgcatgtgcatacatgttgattgtggcattcagtacacagccgccaaactcatcactatatggtgaaacatccgtacctcccccggcaatacctaaccttagcggcgctctacttctaattttcacgataaacctttttaaattttttgaaaagtatttattatcgatttagcaggattcgctctttagcaatttcatcacgccaatgatatgataatttttcttaaaagcgagatgatttacacatgaatatcccgcgattccaataataataaccagtagattcacataaaataagtgcaatatcgttaatctggaggtaaacatgttcgtattccctcaaataatttattcggtgttttccctccttaagttttttgggggcgataatttaatcagtttgccacaaagtttatttcctgatcagagactttattaaaatcggtttcctttggaaagtattgtctaattaacacattaatattctcattgatccctttttcccaaggtgagtaagggtgagcaaggtaaatttgtgtttctaatttttttcactgatgatttcatggtcttcgaactccaaaccgttatcgaatgcgatggtcttactccctgattttaacgggtataatactttcactaccatttttactacttctgatgctcacttgctatcaagtttaacgataattgtatacagcgttttgcagtcaatgagtgttaataatacatttttttatcttttcttattatcgtattctctttccggtcactaatatgttattttttatcaacgaattcagggcgttcatcaatattgacccggtctttaattttgcctcttctttcatagcgactatagcgtttgcgatagggttttctggtaattctgagatgttgccataaatcatcccttctctctgttctttttctaataaaaaattagtcaggtatgaaccatcctgaccagtaatacctgtaattaacgctttcatgataaccttattttgaatatagataggatatatagttttgagttacgcttttttgacggaattcatttgctatggtaaaagaactagatgccatcttcattttttctttttcatccattagaaaagccttgagtaatgctgtagataaaccatcaatctgtaatgtgaattttattgaattttcctttctacataatacatttaatccaataatatcgctacctagcaatatgcaggaagctgcggcaccttctaataaagcatatcctaaaccttcatgatagctaggtaaaacagcaaagtcagagcatttatataattcgtgtatatctagcaccgaatcataaattttaaaactatcaggaatatagcctaaaactgtttttacatctttagatgtacagccaacgattaagagaaggggctttgtatttgtgtgtgaaaaagttttttcaaagctttttaatagaagattaaatccttttcgtttatgagggcgaccaacataaataaaaaccttcatatttttgtctatgccatgtttctctttaaggtcatctatatatgacaaggataatttattgtcataaaattcattaggtagtccagaaatagaacctgaaccaatcaccgatacatttttatatgttaggcagcttaaatagggaaccagttctttatttactgtcaagatatccgtggcaaaaaaacagtttattttttcaatggattttaatgcatattttaataaaccagaatatcctatgtaagggacaccatgattataataaacacgtcttttaattccaaatataaaagatgctaataatggtagaaatgcacctttagtcatatggcatatgataatatccgtatggtttttcttaaaaaaacaaatcaatctaattaaattaacaatcaataggaatggatttaaggaaaaacaaaatttagatttaatatatttacagcgcaaagcatccaagaatttggaagagccatttaacggatcaactaaaagtgagctttttaatccatattcaatttcagataaaattaatggctcaataaatctttttgcagtaaatgtatttacaacagtatgtataacattcattaagataaatcacttttttggtagaataaaaactttcaatgagctaatcatgaaccccagtaaccagataagccttggtcttaaaagaaactcccgtaaacaatatgaagcactttctgcatatggtaatctagagcctcttgattgattaacagatattctatatttcaatgtgacaatatccacattgcataggtgatatttcttattccgtaatagtcttatccagagatcataatcttcagattgaaatcctcctaagtatcctttttctttaattaaagtagctcttttaattgctactgtagggtgaacaaaaatatttttaaatggaattgtttggataaattttttcattggtggtgtgtatttatttaaaacggtagagttttcatcaataaataaaactgaagttcctataacatccggtttattatttttatctatttgtaaatttaaattttctaacctatcagataatgatatatcgtcagcgtccattctaactatatattcaccagtagatatatttaaaccataatttaaattaaaagaaagctgtcctatatttgttctataacatttaattctatcatcattatagtcttgcaaactattccaaagtttatcagtacaattattagctacgataataaattcaaagttgtgatatgtctgattcagaatactattaattgcttcatctaggaaaccatcatcacgattcacacacattaatatagtaaaaaatctagacatactggtaaaaccacctaattttatcgttactttttttgacataaactgggcattatgcctgggcaatacaatttttttattacaaaaattatcactcaagaatgcaaccctccagccaaagatacttctggataatatatatgaactccaatctttttaagataaaaatcaaagctatttattttatgaagtaccccattttgaaaatagccaatctaatatttacattttttaagtgattcaactatgttaaagttaaaatccatatcagcgttataattatatagtaaatagtctcggaaacttattatgttaaatgagcgaatcaaagttttgaatacctttccttgatatctgtcaaataatagaagcaagtttttctcatatttagaagttggcaaattttcttccctgaatatttttctgtaatctacattattatgctgtttttttatctttaaaaaagataattctatttttgtatcaatgttatattttatttttaaataaatagttcaagctaattgaaagagttgatttcccaaaccaccgtcaattacactcattaaaaaaacggtttaaatcagatttaaacattgagatatcatgatgctcaagtacataatttctcaattctaaatagtctttcttaatatcattaagatattgtagcttattcattaattcattagcacttgaaattataaaattattagctaatttagatggtataccagaaaaagcctcttcactaccaaaaacaaccttatttaagtaaatagaattcaataaaatatttttcactccagcaccggcagataatggcataattacaatatcaatatttttattaaaggttataaaatcttcaatataatcaacattaaaacagttggatgaatttaaaaaatttaatgcagtattaatccaaggcttccgaccagaaccatgaaaataaaactgaatatcattgagttcttttgttagaatcacattattaaagcctttaaagaaatgtttcggatcattgcaatagtgatcttgtaaatttagaaaagcggctttctttatggcgtgtgaaaaaatacatggctcgactttcattaattgattttgtatagggtgatgaaagtattgtatgttatgttttggaaagcgctttttaagactttttacatcatcatctgaaactattaaaattaaattgttttttaaagaataaatcaaacaaaatatataataatatctaaaaatttgatataaatattttagataatttttgtttctccatctaacctttgatatgctttttatcgccctaagtgggtcgtcagggaaaataataagatcaatacgtttagaaaaaaaagatttataatctaaaggaaaaaagatatattttgtatcatttttttttgaaatttttcgacggaaaaaatgaatgaaagaaaactttttatactgtacattatcggagtaatgataaagtgagcgttttaaaaaaaatattccggtattactttgattattgggtttttcaaaaacaaatttcataaaatataatctccattacctaaaaaattcttataaaatctaagtgatgataataatatccaaattattagaaataatagtttgggttctttctgatatttaagaaacaagagtacaatcattaaatcagacggaaataaaaaccgattaaacattgggctaaaaacagttaaaagagaaagaaatggaggtaataatataactattttgtcgataccttttaagtaattaccgagcgtgagatagcaaacgactgctaaatatatattaatgacaaacgaaatacctaatcctgaagattcatttgtatacactgaactgttgtatacatattgttcaaatttaaagtaaagaaaatcatatccccataacgccgtagaaaaaatgacaaaaaagataatgatattttttagcttgattttaaatctaatatcttcggagttaaaaactagtaagggtaaaatagaacccataggatgaataccaaataaaagaattgatgcgaaatagcgtgtgatgtttttataagaaatgaaaataaaaatacatagtaaagtgagtaaatgaattcttgttgaaaatggaaccaataagtgagtgaaaaataaagataaagatatatagattccgtttcttaattttattgctatatatgctaaagatattgttattaaaatattttgaatggcaaaaaaaagataagtatttatccctattttttgtgtgagaatattaaagaaataataaacaggggagtcgacagtattaaaatattgaaaaacatcagaaaaagatttcagatgtccaaaaatttcttgatacgatcctttgtctgggccatttaatggaaaatatatagataaaaatataagaaaacagaagaaaagaaatgacgctgctattcggttgtatgtgtttattactaataacaggaatgtataaacaaaaataaataagataaaaaagtcttttggtatagtctcttgcttaattaaaatataatcacttacgtagatagaattcataatgctttttaaaaaacctaatcgtagaaaagaaaacgtcaataaatttttctgatgaataattagatgaaataatatttttcatatgatttttaaataaattatcatctatttttttattattttctagggcaagtaaaaagcgggataatgtagcgttactcgaatgatgatgaatgtagtagttatatgttttgttggctatgatagtgttatttttatacagtttttctattatctcatttaaatcatatccattatttttcgagtttgaacttgttatatattcaccaacagaaaatccttcttgttcataactccaattatattttattttacttgcctttatgtaggaggagtggagattcattattagtgatggtattcctatagatgaagagtctaatattgaggttcccattcctacaactagatctgttttggggtaaatctcattaaatacagcctcatttttcataaagccatgataaataatgtctatattagatttttcatttttaagtttctttactttattttttaatttatttaatgctgctccatccccaacaatatttaattcaatctcgtaatttgttttaaataagttttcgataaaacagtaaataggataatatttaaaatcaaaagaaattcttgagataatagaaataactaatttagtatttattactttaggttcagtgattcgttttcgtctagtttctgaagttattggtaaataatagatatcacataaatttaaatttagccattgacatgttgtatcataattaggtttatccatgaataccaaactaaaattctctattagtttattagcaaactggattagatttttttttcttttatagtataagatgtttattaaaaaagtagataaactccctatgttaatatttaatattcttaacctgtttatatattttaatattggagcacataattcatctggttgcaattgccaaataagtatattatcaaaacgtacattatattcataaaatccgcgcatatcttgtgcgctaataacaacgtggtcaaatttaaagtcattaatatccgatattaaagttatattaatacggtcatctaatgtaaataattttaccaaatcactatttttgactaacaacgtgacaatgtagttattagttagtttattagctaatctagtaaatagtaactcggtcccgccataaatatctgacggcatataaaatagacaatgcttcatttgtgaatcctgatatacccgactatatagtataagttacattatacctaacattctaatgtgagctaatttaatgaaattatatgttattattgtgataatttcccctacttagtctagatagcttatacccaagaaacttcaagatgcagtttttagcacctgaaaatggtcgttaattctagacatcagcgagtccgctatatccggtagcgttgtggtgaaaaatttgaagactttgtctcgaaattcatgtttatccgcgaaataacggttatttcgaacctgttcattcatgaccttccataatcgctctattgggtttaaatttgggctatagggaggaaggtaatgtaactcaatattgctaacataagcccactccttaacaagatgagctttgttgtaacccgctccatccacaataaggtgaattttttgatggtagtcaggataagactttcttatttcattgaaaaaacagcaaatgttgtagtcattgatggtctgatattcctggaacacggtacgaccaatggcattcaggttgagcgcgcccaatatattcaggcgagtccggcttcctgttgttttgactgtttttttctcgcctttccgcatccagccataaccgagtttggtgccttgagtcgggtgaacagcgtcaaggaaaaggatgggttcatctttcgcggcaactttaagattttcatagtattcaataaattgttgctgtttttctacatcgaatttatgagggacaccacaaggttttttataagaaaacccctgacggtgtagccatttattcatgccgggaatgctaaaggtaatcttccagagctgagcaacataggccacgatttcatgggtgtgatggaaaagatgttgagataagtggttgattaaaaaatcagtttgttctcgggaaagcaaactgtcagagcccccattacccgatttaagtttaccgtgattaaggtaatcactgatatggcggtcaacagtggtctgatggagtcgcaatgcctgggctatcatcatagaactccacccttcagaagccagaaggatagcttttattctgtctcgtacctgaccatcgcgagtggtgtcgtgaaggcgttcaagtttgattttttgttntgatgccacaaatattttcatagcgaggataatgatctccatttcggataaaatcaagcatcttcaatgattacgggtatatacctttatgatctcatcatctatttataggtgaaaataagcattaaatatggcttcttgattttctttatactttatgaaaaataagtaatctatcgtttttatggtaattttatctataaaagatagtttattttacactaaaggtgatagctatttatagtaattatagtggttgtctatatggataaaaatatataaatgaattttaatatgaacttcttagtaaataattttatgtgggctactataatcagaacctcgcgattctttttagatttacataaataaatatgaaatatgctaagtaacttactaaataggcaatattagcgcctttaactccaaactgttgtatgaataaatagcttaataatacaagtgatactgaaaagatgatttctgttgaaataaaccacttggttgaaccacgggataacatagggtaagcatataaccaagataaaattttgataacatcaccacataattgaacagcaaataaatttctggcttcaatgaactctggagtaaataaaattcttatagcagtatctcgaaaaaagtagactccaaatgccaatatcataacaatgggcatgataaatttagcggtatggtttatttctttcctaatttcgacatatgtatttaatgatgataatttgggtaggtaatatgtgcttagagataatgtaatcaccgataaatatacttcagaaattttccatacagcttgccagtaaccggtgacattccaaccaacatgggatattagaatattccttactaatatcaaggaaataggaatggtcaaagcacttgttaaagccatcagcatgtaactagctatatctttacgtgcctgagtatcttgttttccccaccaatagcgaagtttcatccaaggttgacgtaaatttgctagtagcattactatacctattagcgctgactgtattgtagctgcaagtaatgcaccttgaatatttgcagcaataattaaaccaatcataacagcagaagaaatcagagttgatagcatccctaaaccgacaaaacggcgatagtgttgctgaccattaataactgaattgcataacgtgcctaatgccgaaaaaggtagcacaaatacagttacaataactacccaagccagtgaagagtcatgtaaaagccagcttgcaatatatgatgagaatatcaatcctatgggtatcgtaaaagcggtaataacaataacccagtaaagtgaggctttccaccatggagagcaggctttaaatccttttgtgtggtactccgcagtaaagcgtacaataccactattcaccggagcgttaatcacaccatttaggctgccgaccatactttgtacttgacccaacatcgccattcctgtaggtccagtataaatagctacaacttttgcaataacaaaccccatcgccatacgcaatagagtttgaagtcctgtcattacagaaacttttaagagccgtttcatggcttgaaaccattaactatatcgataacatattcgattgcttcaatgttcatagtagggtcaagggggagtgaaagtacctgctgatgaattttttcagtaatagggaaatttaatgtattccattctgaatacgctgtttgtttatgaggagggataggataatgaatcaacgtttggatacctttttcaaaaagatattgttggagtttttccctatgtgaacaattaattacaaacaaatgccaaacatggttttctggatggagtgcattttgttcaatggtgataggtaattttatgtatggattattaatattctctaaataatgctttgcaatgctacgtcgatattctgtttcgatatttaggtattttaattttacagagagaaatgcagcttgaagctcatctaatcgactgttaatgccttgataaatatttttatatttttcatgtgagccataattacgtaatgcttttatagtggttgttaattcttcatcgtttgttgtaattgcacctgcatcacccaaagcaccaaggttttttcctggataaaaactaaatcctgatgcattaccccagctaccggcttttttacccactatttcagctccatgcgcttgtgcgctatcttctagtactaatagattgtattcattggcaatcttcatgatttcaggcattggtgagatttgaccatacaaatgtatgggcaaaataacttttgttttttctgtgattgcggatattatattattagggcttaagttatatgtattttgatctggctcaatgagaacgggcttcaaattatttgctgtaatcgctaatactgatgcgatataagtatttgcaggtacaataacttcatcaccatcttttattttacctaattctttccatgctctgaggactagtattaaagcatctaagccattagcgacaccgatcgaatgttttgtgccacaatactctgcaaattctttttcaaaagattctaactctttccccattatgtaccagcctgaatctattactcttgaactagcttcttttaattcgttttcgtattttttatttattgcttttaaatcaagaaaattgatcatctttatcagccaaaaataatatgttattaaatataattaattaaaaatcgagattctattctaatgagtgtttttatatatatcagaaaaaactttgtaatctcttatataatcggattcatcataatgctggcttgctaaaactattaaaacacaatcttctgaaaaatcatgcatttctctccatataaatgagtctatcaatatacctttttgaggttgatttaggatgatatcttctgttatttttccattgtcgagtcgtattctgcaacttccttttacagcaaataaaatttgtttgagctccttatgtgcatggaaacctcttgatacaccggatttagtattaaatatgtaataaactctctttatttcaaaagggatatttttgtttccttctaatgaaattagctgtcctctctcatcaccaagaattttaaaatcaattagttttattaaactcatatcttcctctgaataagagattgtaaatactttccatatccgttttttgacatagagttagcagctttggctatatcattttcattcagccagccgttacgccatgcaatctcttctaagcaagcaattttaaagccttggcgcttttcaatagtttcaacaaaggtggcggcttctagtaagctgtcatgggtgcctgtatctagccatgcaaaaccgcggccaaggagttctacatttaaagaattatcattaagatacatctggttaattgatgtgatttctaattcaccacgatctgatggagtgactttcttagcgaaattaataacccgattgtcatagaagtaaagacctgtgacagcatagtcagacttgggttttttaggtttttcttcaatagaaatcgctttcatctggtcatcgaattcaacaattccaaaacgttcaggatcttttacttgataaccaaagatggtagctccagttttttgggaagatgctttttgtagttttggtgagaaagcttgtccccaaaagatattatctcctagaactaaacaaactgagtcatcaccaatgaaatcttcaccgataatgaatgcttgggccagtccttcaggtttatcctgagttgcgtaactaatctttattcctaagctatttccgtcgttcaaaaggcgtttgaagtttatttgatcttcaggggttgtaataataagaatgtcttttatccctgctagcatcagtactgataatggataatagatcattggcttatcgtataccgggaggagctgtttagatacacctattgttatagggtataatctggtgccggaaccaccggctaagatgatgcctttcatatgaatttgaccaaataatatattgtttttaagtctggggtaatttcacgagaaccactaaatgaaattatttaatagcttttgcctaacacgtggaaattttcttgcatacgtatttatagagatgaaaaatctaaatcaacatatttaagagtcattagataaagctaccgcactaggtttttggctcccagagtgcctgtaatattcggaaatcttatctattgcactgattttccaatacttttgtctgtcttaacaaaaagtaatgggggataagattttgtaactagttggggggagattagactgtaaactcttctgggtcaagtttaacaaactacttgtttaactaattggtagaatagagttagctgaaatctgtattgctgctcacggaatggcggttagctcttaccaacaacgtactatgtgctttgtttttcaacaggtttccttatgttccattcgcctcaggatgtggcagtattgccgtgatatccatctggtagtaaagcttaattgtgactttatgtttatttagcattgtgattggtgaggtaacgatattcctaattctgcaatctgtaatctttagcggtataggtaaattcagtagtgatggttatctaaaaggtcagagaagagggggagagtggttagcgtaggttcggggatatttggtaatatattattgatgctcagtagagttttagtagttttctttaactatagccgtaaaacgaatttaaacttgttgtgaatagaatcacactcatttaagcgtcagaatcaattttttgatattaagtggatttacggcagttagcaatgaaccggcagagacgcctacgcataggagtattagttttatagaaatgggttcatctaccagcaaataagcaaagatgactgcccagatagcataggtgatgtttaaactcatcgcacggataggttgaagcatgcagattgctttgtagtagaagaggtacgatagtgtggcgaccagagaggtgaaaaataataaggagtataattctatatttgaaaaaatatgtgtaactccaggaaaggagtgaatgaataatatgatcatgattaaatagcccacagaggatgataattgcctgatgaaataagcaatatcagcaggtatatctttgttcatgccgtaagagctgataacaacttcggaactccagcctagtgcgcatataaaagcaaagaaaaagcctatccagccagatgttgtctgagttgatgctgaataaccgagtatcatagtacatacaacggccaatattaatcccaatatgccgataaggtgaatgcgatctttaagtaggaaaaaagaaatgagtgcgccaatagccgggtaggttgctgaaatagttgctgtgtagctaatgccaatgtattgaatagctaagatataacaagacatgcccattgggccaccaaatatagccgccaatacaattatgccatttttcttgtttttggggataaggcgtatcgctcggtattttcctttcactacaagatatataaacatatatccgcatgaaatcgtatcatttaggaatgcgagtatgatgggaatgaagaaacaacaggaaagtgcggtgttttttagtaataatgcgaaaagtacgccacttagcccccagaagacaccagaggagagtccgtaggcattggctgttactttacggttgatgaatatagccatttgggtactgtttcataaatttatagactcgtgctaagaggctagctttataatttccagatgtttaatcattctcctttgtttaaggaggaaatgaaggaagtataatgcatatgatatatacccgtcatctttcaagttgcctctttgttggctgcattcgctcaccccggtcacatagttacctatgctcccggggattcgctcccttgccgccgcgatccatcttgaaatccatagggtatatctaataatgaggtttttgttagcttgttattttaattttcgaattatttgatttttaatttctcgtgtgttaaaaatttcataggattattatttgtctagaaggctaatgtcggtaatatgattttcagccagtttcatgacatgagtgtatttgtaagtattattttaaaagatcgtaaatataatctttaggatgaaaatcaataggagcattaatcaggatctgcctaatattttcaaaatcgtaattttcacaagatgtttttaagtcatttaataatgggtttaatttatcccaggtcagaaaaacttcattggctgtcatgattcttgggtgattagtgccagagacgttatcaccaattaagagttcttcataaagtttttcaccgggtcttaatccggtaattttgatttcgatatcaccatgaggattggtttcatctttcactgtcaggccggaaagatggatcattttccgggcgagatcataaatttttactgattctcccatatccagaacaaagacgtcgccattattgcccagtgctcctgcctggatgactaattgagccgcttctgggattgtcatgaagtaacgggtaatgtctttgtgagtgagggttatcggtccaccactttttatctgtttttcgaatagggggacaacggaaccggatgagccaaggacgttgccaaagcgaaccattgagaattttgtataactgtgctctttagcaaaagcttgtagtataagctcggcaaatctttttgttgcgcccatggtattcgtcgggcggacggctttgtcggtagagattaatacaaatttttcaactttttggttaattgctgcttgagccagtgagagggtgccaaagatattgttattaatgccctctatggtattcatttctaccagtggaacatgtttatatgccgctgcgtggtatatggtgttaatgttaaatttattgattattctagctatcttttctgaatcttttatatctcctaaaattgcagtaatcgttatattcaaatctctatctgagtttatcttttgtaactctttttctattgaatagagacaatattcggttaattcaaataggactatctgagagggagattgagtaatgatttgcctgcataattctgatccgattgaaccaccggcaccggtaataagcacatttttgtttttgatgtttttactgagtagactttgtagtggatcaacttgttctcttcctaacagatcgttaatggaaacgcgcttcagtgagtttatttgcgctttgccttcaaccagatcattgaaacttggaatggtgaggatttcacaatgttctttttggagtctttctagtattttttttctattagatattgatgcactgggtatggctaataatattttctttatattatatttttctactaagatggttatcttctctgaagagaagacataaactccatgaatagataaattgtgtaatttagcattgtcatcaacaaaagcaatcgggttgaattctctatgttctcttaatatgggtaacagttgccggccagattctcctgctccgtatatgataaccggagcacctttatattttagtaaattacgtagcgttctatagataaatcttgtaccgcagagtgagataaccagaaaagagaagtagataatcggtacagttctgggtaaaaaggcttgttggtataaggaaattgcagtcaatagtagagtagatagaaatgaaccaataatggcccatttcaatatactcatgttgacatattttaatatcgatctataaaagccaattcttaagaaaataaatagcgtgaaaggtatggtgaatataatggttaaccaatgctgtaaactgtaaatgggcacttctctatcaaggcgtagccacatgctcagccagtatgaaataataatgataaatatatctacaatcagaaggacgatggttttaattaatctgtcttggttgaaaaatattctcttgttcataatggttaattacctaaaaactactttgtaaattgttttgaaaataatcttcaggtcatagaaaaatgactttttatctatgtattctaagtagtacttggcttttatcggcataataatatcgatataggcttgatgaggatcttgatattggcttaatatctggttttcatcgatcatttctatagaagccaaatctgtgatgccgggttttaccgataatattttgtttctgacatcatccgggtatttgtccataaattgtggtacttccggtcttggcccgactaagctcatttttcctcggacaacgtcaatcagttgagctaattcatcaattttatatttgcgtataaattttccagagtgggtaatacggagatcatgaccaatagtgagttgtcctttttgctctgatcccgtcgtcatgctcctaaatttatgaatataaaaatcttgattatattggcctactcgtttttgtcggaaaaaaataggtcctttcgaatcgatttttatccagatagcaatcgtgattaaaatagggaatagtaggatgattccaatgagagaagaagtaaaatcaaaaagcctttttatagctaaataatatgtcatcatttatgccaagatctctttaattgttttgataacgtatatttggtcttctttggtcatttttgtatataaagggatggatacaattcttttaaagttttcttctgcgactgggaagttgttttcgttaagagaataggtatttttccagatgggttgtttgtgtagtggaataaaatggacagagcagccgatatttttttctgccatttttataataaagtcatctctggatattttgacttgatcatttaatctaatggtatatagatgccaggcgtgttggctattagattcttgaggtttagtgggtaagataatcggtagatcttttaattcatcatcatagagtttagccattgcctctcttttcttgtggaaagtgtctattttctgtaattgatggatgccgatagatgcacaaatatcgggcatgttatatttatagcctggttcaatcacttcataataccaggcaggtattttagattgatatcgatcaaaggcgtctttgctaatgccgtggaggcgcattatttttgctctttttatgatatctggatgtctggagactagcatgccaccttccgctgtcgtcatggttttattcgcgtaaaagctgaatacggtgacatcggtatctagcgtgccaattttctttcccttatataaagtcggaaatgaatgggcggcatcttcaatgattcgtagattgaattttttagctattgcaataatggcatccatatcacaggataaacctgcaaagtgtaccggcataattgctttagttttggcggttatggctttttctattgctattgggtcaatattcaggctgtcaggtaaagaatcaacaaaaatagggtgagctcccaaataacggacaacttctgcggttgccgtaaaggtataggtcggaacgatgacttcatcacccggctgaataccaatggcttctaatgctaaatgcaaccctgccgtggctgaatttaccgctatggcttcaacatcggaacctaaatattgcgcaaaatcttgttcaaatcttctggttttaggtccggtggttatccagcctgttttaagtgagtcaatgacttcatcaatttcttcttggctgatttctgggagtgcgaaagggagaaaagaagagttcatgatataatccttatcttttgttttttacgtggaatttcttattgaatataattttcattattccaatgagataccctgatccataagataaatgtatgtacagaaatattaatggtaagaaaatatagttttttttattttttaaatgggctcttattgataccagtaaagttaagaagaaatagataaaaatacaacctatatatagatataaaaatattgagctagtgaatgagaggattaatcctaggattaaccctaagacaaaaattggtggtattaattgccagaatgatgttatttttttcaatttggcattgactaatggtttaaataaaccgtattggtagaacatagaacagatttttttaattgaatctctggggtaataatcaataataatatctggggaaaggtatatattacctccatgctttataattctgttgttaaactcatcatcttggtttctaattaaatcttcatcaaatagccctattttatcgaatagtgttcttttgaaaaagccgaaaggtactgtatcaactttttttatattattaatgccaattcgaaaataggaattacccattccaaagcgactacttaaggcatatgcaatattgtgggaaatggttgtagaattacatggttttgtattaacaatcccacctatattatcagcatcaagtttttttgataagttatatagtttggataagtagctactgggatagctggagtgagcatcgattctggctatatattcccctaatgagttttttataccaatattcagagcagtaggaacatgttttgcagggttatatagtaattttatgaactcatatttttcagtataactctgaattacttttaaagtactatctgaactacaaccatctataaaaataatctctaattgcccggtagggtaatcttgttttagcagtgattcaatacacccttttatatatttttcttcatttaatatagggcaaataactgatatatttatcatggttgaatagtcactttatttagagtgtaatgatagttattaattcctatgttttatttaaatcttctggttttaggtcgggtggttatccatcactgttttaagtaagtcaatgatttcatcaatttcggattgtccaatttcaggtaatgcaaaaggaaggaatttattattcatgattgatgatggccttgatgaaattgtctgctaatacggaataagcgtgattttctaaagcgtaaattttaccttttttccccatttggtttaattcgtcagttgataattcactgagttttaataaggcccgagcaatctcttctggcttgcctgatttaacggtgataccgcaattcacgtcagaaacaggatcattaccggcatcaatcgcacataaaatgggtttgcccgccatcatgtaatcaatgagtttattggggctgatgccaaatctgaataatgattgcttttgtaaccctatataggcaatgtcaattttattgagtagtgttgggatttgagttttggggatcggatcaaagaatataacgttatttgttctcagtgattgagactcctttattaagttatctttttcaaggcccgtgccgactaataagaaggttatcggtttatcatgaagcagtgaagccgttttgagtagtttttctagcgcatttgggcggccatgggcaccgctatagcatacaattttatgccctttatttttttcagttataataagtttttctagtgaacggtttaatggagtaagttgatttatccaatcctttataaccacgccattagggataatatgtagtttattgagatctaatccatgtgctttcgtatgttcttgtactttaggaagcatggaaataaccacatcagcatgtttataagctgtgttttcagcaagttggcataattgaataaatggatgtttaggtgacattccacctaattctatgggtgaaagcggccataaatcatgcagttcaaaaaccagtttggcattggcttttttggcaagacgtttggcaatccagatatccattggatatgtacttgaagcaataacaacatcaggtcgatattttttgactaagttatggctatcaagccaaatttgccgtaaaaaagagaaaatatttttgactctggataatccatttccattataactcggggttggataccagatatattctaatccgttaatattttcggtggtttttttattctctatcagtttgggttgtttggtccgtacatgagaataagaggctgcaagtagggtaatattatgtcccgatttaatccattcttgtcctaaatgatatggacgaaattccatcccaagatccggtgagccggcatagtggtttatatagacgatattcatagtgatttttctagttcgtcagcaattcttgtcgcagcgataccaccaccatacatggattgaatcgagtccatgtcaattccaatcatgtcatgaacggcttgggttattttgttactgtcagcctccgagagtttgtttacgcccgcggcaattaattctacccattcagtttgatccctcacagtcacacaaggtttcttgaagaaaaaagcctctttttgcagtccaccgctatcggtaataatcagggcggtgtttttgagtagccagatcatctctaaatatcctactggctcaattaaatgaacatctaaatgtaagtcgtattgtgctaacatttttttagttcttgggtgaattggcataacaacaatagcagttcttttatgtatattatttaaggcgtttactatttcagttagacgttcctgattatcggtattttcagcacgatggagcgtggttaatataaagtttggtatcgcatccagcccatcaggttttttcgccatttggctaaaatataaagcggcgtcttccatcacatcaccgacttgtttgatattaacgggctttgaaccgaagccttctttttgtaggttattgatggcagtgtctgttggacagaaaagaattgaactcacattatcggttaatattctgtttatctcttctggcatctgcatattaaagctacgtaaaccggcttcaacatggataatcggaatatgtaatttagatgcggctaatgcaccagctaaagtcgagtttgtgtcgccatataccatgacggcatccggtttttctgtgatgagtactttttcaatttcgatgagcattctacctgtcatgtcaccgtgtgaaccaccgtgaatattgagtgtgtaatccggtttgggaatggctaaatcattgaagaagacatcagacatattagtatcaaaatgttgaccggtatgaatgataatttctttaaatttgttattattttttaaagcgcgagagactgggcttgctttaatgaattgtggtctggcacctaatacggtgatgatttttttcatatcgattaacgtccaatgtgttgataaaatttggttagtttattttgttcaatatcccaattgtatttttcattgactgccagaagcccattgttacccatttcttctgctatatcagggttatttgataggtaatctattgcatcagctatttgcttagggtttaatgggtcaacacaaatgccacaatggttttttacaactatatctttccataatgtgaaatttgaagcgatgaccgggatacccgcactcatatattcgaatattttattgggttgggcatcgatatgattgggaagtgggtgatatagaacaatacctgcaatagatttagataaaagctctttggtttctatgcgatttaaaaatcccagtgcatctattttgtgccaatttttcatattttttattttgttctcgagttctgtatctgaaaaattgcccgcgagtttcattgttgtatttgttgtgaggtgagagagggactcaaccatttcggctatacctctaatgtcggaaataccgccgacatagcagacttgtttttctttttcatgccagttggcatgtttattatgcaactcacctaatataggatagttattaatatctatggtgttgttattgagttttaagaatttgtctcttattgagggtgtggctgtaataatgccatcaaatttaggtgtagaatacttctcgtagagggcgaatagtttagagataataacccgggtaaatttatttaagtaaggtttgctaaaaatttgtttagggacatcttcatgggaatcaaaaatgactattttacctttccttttcagttttagcccgatagggatgagttctggatcatgaaaatgatataagtcggcgtctaattctaatgcttttttataaactttatcggttgttttaaaaattctatttaatcgaccgggcaatataccgacatcaatgatagcaatgttattcttgacttcattacctttaccatctgcaacaataagtgagacctcatgttctttttgtaaggcagaacattcttttaggaaaatacgggtgtcgaaacgtggatgtaccgaggtcatatgtgtgattttcataagggtattttgttagttttcgttgggaataaaaataataatatgcttaatgccagcagcccataggtcagtagtagtgctgtaatcgctgagtttgatattgtgtatacgaagggtaaatagagtgtcgttgaaagttcaaatggaaccttttttgagctcaggttcattgcaaagattaatatattaaatataaaaaagtttattattaaacccagtgtaccgtatctggcgataccgtctccaataaagccagtattagccgaacctgaggtgccataatagatttgagaaactatttgcggcgcttctgtcgtaaattcactattgttgttgtagatataatcataaaaataataggtatttaatgtcggtgtgaagaatactctgcgtagccaatggatcagtgggtcataaaaatcgaaaattaaatataatatcccggcggtcaggaataaatagaggatgatatttatcaccgagttacttatcgattttgttccttttatatagaagtatagaatgataaccgcgagattcatgaatgcgatgctttttaatcctgaggagctgtagattaaataggaaatcaaaatacttattgtaatgagcagatattttatcggacctctaatatagagtgaagctagtaatagcaatggcgagataacatatcccccattggtgatgatgtacatcgtgagtagcggtgtgttgtctttaaagtgctgtctcacggaataaactttaaatatattagggggtattaaacttaatccaggattgctaatgacgaataagaggacaataataccacatcctattatcagtattttatataaatcccacgggatttttagtttcggtattgttattctatctattatccgaaagaataatatagatgagaaaaataatatgtttattgtgcagacgaaaatgattgaatagacagaagctgaattaatcagtgggaatataattgataccggtataatgtaagtgatatagattaaccataaaaaaaccatcacgggatttttttggttgttgagtaaaatgagtggtaaaaatgatatccaacagaaaataatacttaagtaaccttgtggggtaatattatagcctcttacctcatggaatgtatctaatataagtattgaattcaggtagataataacctgatagataaatattttcaggattattttaatattattttgcatttttgcggataaagaagtaaatgaatgataatactaagatagacaggaaatacatagtgataaattgatagtatgcccaactcgtagggccatgttttatgtaataatatccgctattagcggcggatttattccaattattatataaatctattatttctttatttttaaaattttgatttctagctatcagatcttttaaaagaagagtatgtattttgtgatatttaatattgcttgggttgccaattaaatcatagctggaccattcattttttatgtcgaacttaaatatattatggctgattgattgatataatttatcggatattctggtgttttcatctgtatttaaataagtttcaaatgactcaataccataagtagaatagatcatgccgtttaatacaaaagccaattggtctgaattggcttgaggatcaacgtactcttcaatccaaggcatattatctaatgttgttaaactgccgcctttatggataggtgcgagtgatgattggtatagtcgtttcgacgtgagtagatatttatcatcgtcaaaatggtcataagctcttaataagagaataatggcataggcatcggttagtccagaccaccagggggcagagagtttattatttttgtagcctttatatgaccaatcaaaatcatataagtaatgactttcaccatgaaatgattttatattatttaataaccaatcggctgaaaatttaaaattagcaatcaattcgttttgattgaattgaggtggcggtacattccatccgggtaaggatgaatcggttcgccataatatattggcgttatcttgatttaagcctaaagaagagtatatcaggccatagtgaacaacataaaatggggataagaatggctctggaatatgaggtgagtgagataaaggaaagccattgctattaaattcgcgttgcgtgaatttccctttcatgactaagtttctcacattgccattgaattcatctagctcataagcatatttattgaatgtatagctgacaatcatcacgataatgatatagggaattatttttattatgattttcttcatgttaaccttattgacgcatgaaagataattttaaaatataagccgtacttgtcatatagagaacaaaacttgtgagtgaaaataataatagggtaaggtaaatatcgcctaatagatatccagtaaggagggcgattaatcttaatataatcgatgttgtctgaataaataaattgcttttctgatgttcataaattgataaatataccgataacgatgagtatattatttgcccgcataagtgtggtattaagcataatagatatttacctgattctcgccactcttcaccgaagataaaggttatgatgggtatgcccgtgaagtatgtcactatagcaaataaaatagcaatcagtgttaggcaataaaatgttttttttatctttaagaaaggtgatataagcgtgtcttttaaatatccttgtaatatagatgaaacggtttgggataatagtgtaattggggctcctgatattctggatgcaattaaataaaatcctgccgattttagcccataggtggacatgataaataattggggcagttcattactcaatgtgttaattgaagccgcaggaaaatcataaacgggaaatcgataatatttcttagccagtagtcttatttttctaagttcatgtttgctgataattaaacgatatttggatcttttacttaaaaatagaacacctaatgattggcctaatatttggcctaagatgagactgcttgcgcctaaatgggcaatgccgccaatgatttgggtgctaatcatggcaacggtttgcgttattttagtgatagagagtgcatggtattgtttttctcttatactattgaaactcactgctcgataaaatccataagtgataatacctagcgggatatagtatatatagtttcctataattattttttctggtgtgttagatattgcaaaaacagtgataacgattaggctaatggttattggaataatgcaagataatgtgactaatgagttaatttcacgacttttccctgatgaacttattgaaaattcatatcgaagacaagcacctacggcaaaaacacttaaaagcgatgaaaatgaagcgtaaatacctaattcttccggtgaaaatagtcttgttaatacgggtgttgatagtaataataatatctggctgaataatgatgagagtaataagccagatatattcctcaataatttatgattcatggattttaaattgaactggcaattttattaattatatctatggataaataaggatgcatcggcaagctaatgacttcttgtgcgatttcgtctcctataggcagagcaatattgctggccaccgcgggttgtttatttagcgggatcgggtaatgaatggcggtgggaataccctgttcttttaatctgcgttgtaattcatcacggtttttaatgcggagagtatattgcgcataggccgaaagattgtgtggctcaatatagggcgtggtcgtgataccgatgccgttcaatgcgttattgtagttttctgccacctgctgacgtaatgccatttcttcatcgaatatctccagtttgggtaacaggatagctgcttgcagggtatctaagcggctattaattccgatccggatatggtggtatcgtcggtcttgtccatgacgggcaatttgacgaataattttcgccagttcttcatcacgggtgaaaatagcgccgccatcgccgtaacatcccaacggtttgctagggaagaaactggtacatgagatggtcgttaagttacaggaacgtttgcctttataagtcgcgccaaaactttgggccgcgtcttctattacgatcaggttatgttttgctgcgatggcattaatttcgtcaaaatcggcacattgaccaaataaggaaaccggaatgatcgctttggtttttggggtaatcgccgcttcgagttgcgttggatctaagttatacgtggtgggtttgacgtcaacataaactggaaccccgcccagtagcgcaacggtttcagcggtggcaatgtaggtaaagccggcggtaatcacttcgtcgccgggtttaatgccaatcgccattaaggcaatttgcaaggcatcggtgccattggcgcaggtaatgcaatatggcgcgccggtgtaggcaatcagctttgcttctaattcgtcgacttcaggccctaaaatatattttccatgtgcgaggactttctggatattcgcgtcaattttatctttaattttaagttgctgtgctgccagatcggtaaattgcatgcctttatccttgattatttaattcgcacgacaatatggttattgagttgataaatatgctgagtgtgaggacaggtggcggtggcttgtccgtgtagcggtaaatctaattgttcaccaaattcactcatccagccaatgtgtttagccggcacacccaccatcagggcataatcaggaacatctttattcaccaccgcgccggcaccaataaaagcataagcgccaatggtggtgccacaaacaatggtacagttggcacctaaggtggcgcctttttttacccaggtgttttgatattcactttttctttcaatcaatgaacgcggattataaacattggtgaacaccatgcttgggccacaaaataccccatcttccagatgaacattgtcataaacagaaacattattttgtattttgcagtgattgccgatagtgacttgattgccaataaagacattttggcccagagaacagccttcgccaatttgagcacctgagcagacgtgggtgaaatgccagatacggctgtttttgccgatttgagccccttcatcaacgatggcactgggatgtatcattatgtgttctgctgacatgagaccggttccattgatttaataggttaaaggcaaagaaatggttttgttatctctggctgacaggtaggcggcgataagcagctctaaggattttaagccttcccggccatcagtgatgggttgggcttcgcctttcatcacctcaatgacatttttgtaataaagcggatggccaaagccataaacagaagtggtttcgtaattggcggttttgacttgttggtcatactctttttcgtcagcgaaatgccattcctggatttcattgacggctaaaccccccactctgaccgtgcctttttcccccaagatggtgatggaaccttcgagattttgcggataagtgcacatggtgacagccattgagcctaatgtgccatcccgccagcggatattgagtaccccggtatcttctgtttcgatatctaagtgggttgatgtcatggcctgaacatctttgaccgggccgattagccattcaattaaatcaacatagtggctcgcctgattcatgaaggcaccgccatcaaattcccaggtgccccgccaggcggcttgatcgtaataagcctggggacgggtccagaaaacattcaggtggaccaggtggattttgccaaaccgtttttcactgaccgcccgtttcagcaattgtaaggtggcatttaagcggttttgtttgacgacaaacaggtgttttccggctttatctgccgctttgaccatgttttccccctcagccagccgggttgccattggcttttcggtgacgacgtgaaagcctttatcaaagcaggtcatcgcctgtgctggatgaaggccagagggagtggtcaggataatgatatccgcggtgatgttatccaacattgtattgaagtcgctgaaacccgggacgccggttttttctactgctgcgtttaatgcttcttgatcgttatcacagacggcgactaattcggctgcttcttgatgtacttccagagaattgaaatgatttttagcgatccgtccacaaccgactaaagcaaattttatctttctgtcgttgatagtgctcagcataatcttatcctaagttaagctttgataatgtttttgtgattgggagagtatttgccacgagtatcgacaactaatttggcgtgattgataattaattcataatcaaatttgtcgtgatcggtggctaaaataacgcagtcgaaggttttgagactattttccgtgatgggctggctgattaaattaaaatgatgttcccgcatcttcggaaagaccgggacatgcggatcggcatattcaatattggcccctaattcgcttaatttttccataatatgtactgaggggctttctcgcatatcatccacattctttttataggcgatgccgaggattaatatgtggctgccattaatggatttattcgctttgttcagggctaatacggttttagtgaccacataatcgggcatggaggaattgacttcaccggagagttcaataaagcgggtattgataccatattctcgggctttccaggttaaatagaaaggatcaatgggaatacagtgcccgcctaatccggggccgggataatagggaacaaagccgaaaggtttggttgctgcggctctaatcacttcgtgaatatcaatgcccattttatcggcaaccagtttcatttcgttgactaagccgatattgaccgcccgatggatattctccagcagttttgtcatctctgccgctttggttgagctgaccggaacaacctgatcaatcgcgtgttgataaacggcgatccccgcttttaagcagttttctgtgtggccgcctatgactttaggaatggtgcgggtttcgaaatcggggttacccgggtcttctcgttcaggtgaatagaccagaaagatatcttcaccgacggttaacccgctttcttcaacccgggggagtaactcttcttcggtggtgcccggataagttgtactttctaaggagaggacttgcccggcccttaaatacggttttaccctgtcggtggtgttaatcacgaaactaatatcaggttcacggtatttatttaacggcgttgggacgcaaagaataatggcatcgcattgcgcgatgttggtgaaatccgtcgtggcttcaaaaccggtctttatcgcgtgactgattttggcggagggaatatgttcaatgtaactttgaccttgattgagtttatctgttttttctttatcgatatcgaaacccatcactttaaaaccaatatcgttatatctgagcatgagcggtaagccaacataacccaggccaacaatggcaatggtggcggttttattatcaaatttctcggtgagaatgttgagtgaggacatattttgccttttaagatgatgacttaaaaataaaacttatgaaaataaattacatttggtttttaatagggtgctatctatttccataagttttatttggcaggtgaaaatttaacaagctttttaaataggttgtgtaagatatattgctgaaataataaataaggtaataacaaagctaccgcactaggttattggctcccagaactccatagaatgttataattttatctactgttttgatttttcaatgcttttgtctgctgtaataaaaaagcaataaaatataaggttttttaatgaataacaggggaggttaaaccgtcagactcgccgggtcaagtataaataaaatttatttgtttaatgaatttgtagaataagcttagcagaaatctgtattaccggccatgaagtggtagccaaataaccaagcgtaagccgccgagtgggctgtcttcagcacgaacccaaccgcggtgttggttaatcgcggtttcaacaatggctaagccaaggccagtgccgccggattcccgatcgcgggcttcgtctgtacggtagaaagggcggaatatgtgttcacggtcttccgggttgacgcccgggccgtcatcatcaacggtaatagtgatcccttgattatcggcgtgaaatgcgaccgcaatatggtggtgggagtagcgtaaggcattacgcacgatattttcaaaagcactgccaagtgctaatgggttgcagtaaattgcccaagaactcggtggtaaggttgcttcaagggttttatccatctgttcagcttcgaagcgagcattgtcaagaatatcgttccataaatctgtcattttaatgttttctctcaacagttcatttttatgctgactgcgggagagtactaacagatcgttaatcatgctgtctagccgttgggcttctgtctctattctttctagctctttattttcaccatgacggcggcgaagtaatgctgttgcaagctgtaagcgggtgagaggcgtgcgtagttcatgggagatatcggaaattaaccgttgttgtgcgataaccattctttccaatacactgatcatctggttgaagctgttaccggcggccagaaattcttgtgggccggcttccagttctggatgttggcgtaagttacctttagcaacatcgtctgcggcattttttaatttacgggcaggcttagccaaactccatgccagccataataggagtggcgcactgattaacatggtagcagttaataataatagtggccggtcaaacatcagattaataaaatccgattgtgggctattcgcgggacgaactaaataaagttgataatgatcttctccatctcgaatggaaaagggccctagcatttcagagcggccatattttttctttttaggatgatctgcgttatctgattgtccaataaagttacggacaacttgcatttcacttctttgtgcgccaataacgcgcccttcgctggtgaccagtattaggcgctgacccggaggggcccatttttcaaccgcgcgaaataaacgacgccaccaaagtaaatcgttagcgggatcttgagctaattcagcttcgatatgttgttccagcatgactccctgccggtattcattttccagcagagaggtcaattgtctggaatccagtttcggcaccattaataccaacattaggactaatgccagagtaaaccagaaaattgcgaagatgcgtgccgtcaaactgtttatcatgtcgcagaaaccattaaatatcctcggccacgtaaggtcttaaaccaagggagcccatcttcccgctcaggtaatttacggcgtaggttagaaatatgcatatcaattgcgcggtcaaatggcgtgagtcgcttacctaatacttcttggctcaaatgttcacgggagacaacttgacctaaatgttgagctaatagatagagcaaagtaaattcggtaccggttaaatcgagaatttgattagcaaagttggcttcctgtcggccagggttcaattgtaggttatcgacctgaagcgtgggtgggccattgtctgtttgctgttgttcactccagtttgagcggcgaagaatagcacgtatacgtgccactagctcacgatcattaaatggtttggcaagatagtcatctgcccctaattctagccccagaacacgatccaaatcacttcctcgcgctgtcagcataataactggcgtttgatggtgtagacgaagctcctttaacgtcgtaatgccatttttacgcggcatcataatatcaagtagtaataagtcgatcgaatcgtcaaggaattttaatgcctgctctccgtcatgagcgataacaacgttaaatccttccatttcaagtaattcttttaatagtgatgtcagttcacggtcatcatcaactaataggattttatgcattgattacttcctccaagagcaaaaatacgataacaaactttgctattccacgactttacgttcttttacaagcctctgacgctagtttgcagccgagtaagtatagttgtccacattgaacctaatagcatcgttcggggaaacgaggagttgtttaatgcgtaacatagcagcgttagttttagcgtcaatgtttgttcttagctcgacggcatctttagctggaacagcaagtacaatgcacgctgctacggtacctggtaattgtgcaccttgtgaatataaaaatgtaggaagttatcattatcgtaataataacgatattggtgataatgaccatatgtttaacggtatcactttaactgagcagcagcgtcaacagatgcgtgatttggtagggcagaaacatcaaccgcgttcatcgatgtcaatgagtcccacagagcgagaagagatgcgtaagctggtcactgcgaaggattttgatggcgtggcagtaaaggctctgattgaaaggatgatcagatgtaatgtggagcatcaggtagaaatggcacgtatccatcaccagatgtaccaactgttgacgcctgagcaacaagcacaattggaacaacattatcggcagcgtatgtctcagttaccgaactgatttgtaatacccatagcagcaaatgtagtagcaaagtagtagcaaagtagtagcaaacgagaatttttccttgccatagacaccatccctgtctttcaggccctttttagggccttttttttcagtcacttacaacacatttctttgtaaaacaacaacataaaaaagtatgaaggggttagaaagtatacgaaagtttttgagtgtggacgcttggtggacgctcgccacactctctagctttattctacttctatcccacccttaagagggtttaatgtaatggcatgttgcagatagtccggggcaaggtgtgcatagaccattgtttggattatgctggcgtgccctaatatctgttgtaatgcaattatattccctccattcatcatgaagtggctggcaaaagtgtgcctgaggacatgagttgcttgtcctttaggtaagtcgggctttactacatgtaagatcttacagaaatttatgtagtcaacattgaacagcttgcccattttctttttaccacgaatttctttctctaatttgtcagaaatgggaacaatgcgttgatctccatttttggtatttagaaaaattacacggccttttaatatcttggagaacgcacacattgtttcaaaggttggctgatgagttccattttcatactgtgacactctcgccaaaccctgattaacaaactaggggggaagatcaagaacggcaacggatcacgccggaagtttatcctcatgggctcagtctatcagactcatcaacctcatcctggtaacgtaatggataaaggcgcagtaaatggccttcgtgagtggttcgaaaatgtaataggggtcgaacatgattaaaagcaacaacattatgactatcgacggccatcccgcttctgttacctacgaagcagaaattggggcctttcgcggcaagtttctggatgtcaccggatattgtgatttcgtatcaaacagtattgacgggcttgaaaaagagggacaaatctcactggctgaatatatagaaacgtgcgaggaagagggaattaacccattcaaagaagaggacaagctaaaatcttttactcttcgttatcctggctggctggaagctcgcttgactgcggcggcaatatcacacgcagtctcaaagaaccaattcatagttcagctgcttgagcgagaacttcaataaaatagataacgtcggacagtgacaaaacttgtttttattgctgtttggggttttgaggtctactcaaccaccccagcgataacagatactgcaatagtgacttatcgaggatactttcctgttcggccttgataaatgaaaaagcctacagtatgtgggattgatagatctgttaaggtgatggttaacttttaattaagtatttcttatgaaagtaatttgtggtgaaagccccgtttaaggggctttgtcgtcaatatggacattgggtggacgatgatagaaaaagtatatttattttcaatatgttatgagttgtatgtagacaccatccttgtcttttcccccgccttatggcgggatttttttatctggctaagattaattcactttaaaatcaaccagataaaatttttacaagcaactgtaagtagcgtggaaattttcaagtgtggacacttttgagtgctacggttgcttatgattgctaaatttccatgccgccattcagtgggtttaacatgattgcaaattgcaaatagtcgggtgccagatgagcatacgccatagtttgttgtatattggcatgaccgagtatttgttgcagtgcaacaatgtttccacctttcatcacaaaatgactcgcgaatgtgtggcgtagaacgtgcgttgcttgtccttctggtaaatcaggttttattgattttaactttgtacgaaagctttcgtaatcaacgtcaaataattcccctgacttctgtttgatttccttttctaactcttttgatatcggaatagccctttgcttgccatttttggtttttaaaaatgtcactcggtaactctttacttgggcgctttttaaggttgatgcttctccccatctggcacccgtgctgagacatagcagcttttaattcctcatgtagcgttagccagttttccggtctgagtggtgtgacgttttgatgtctacaccatcaggggagagagttgggctaatttgcccagattctggggcaatctttcccgtcattagccagagtgtgtatttttcaaatttggggttatcgggtagctgcgataactgccaacaaatgcgggctacactggcctccacatttgttagctttattactattgcttaatgctttgaagtgagctgcggcgttttgtcattgtcgccgtatagaatgatccctgacgtgtcgatctcatcttccagttggcgcaagtcgtagttcgtctgtaagcgcatccaaaacgccggattactccccagcgcagcagacagtcggatggcaagtgccggggttaacgccgttttgcccgaaagaaagcgggaaaccgtcgctggagttacgccgatgtttttagcaaactggcgaacgccaacccctaaatcctccagcatgttggataccataacgcccggatgagaaacaatagcctgtatcattagtgataatcctctaggtttaaaatgtaagcatcaccatttttaaattcgaatgtgatgcgccagttagctctgacagtaattgaccatatgtcagcccgatcccctttcaaggggtgtaacttgtaggcatgaatatttaaatcttctaatcatgctagccgtgtcgatggcctgtaagcggtcattgattcggacagcatcctgcgccgggatgcctgaaataactcctttttcaaaaagttgtttcagctctttgtgtttaaatgacttaatcatttgctcccgtccttgttacaccatgcgtaacactatacgccgttgttacacgccatgcaacgccaacaataaataaccaagggccttaaccccaaatctcaaaaaattttgcaggcaatggttgtttaactcattgccatttgaggagatttggcaatagctttttgcaatggataaaccacggatctatacggttagaagaatggaattgtacaaacgaatgtttttgttcttatggttggtgtagagaaaagttggcagttatcgtaactacccggcagctacctattttaatgataattaaagatttagttgctatatgttttatttgatctggttgatttatacaaagatggcttgtgtatataccctatggatttcaagttgcatcgcgacggcaagggagcgaatccccgggagcatagataactatgtgaccggggtgagtgagtgcagccaacaaagaggcagcttgaaagatgacgggtataaattttttggcaaggtgaagtgacatgaatatcagttactaaaaacgaatatttttggtgcttgagcacgttattttagctatgaacgatttcagcaatatttgacgtgtgaagatattgaaaagatacaacgtgcaacaatcaaaatcatcggcgcatcaaatcttatcggtaaatctgaaagttgacttttggattttatcaactagagtatgattattccccgtgagggctttgttaaaaatttctcccgcaaagggcttataacccctcatacatagtatgaggggatttcagatcgctgacaaacttcgttgaaaataacgggggtgattcatctgttgatgaaggatactcgcaatcagaatatcggtatcccggatagtatagaaaaccgtgtgacggtgaaactcaaccagcatgacacctgggacagatgggtattccctccctatatgtggcatctcagctagtgtgtcaaaaaatgcttccagtgcctccgtataatggtcagcctgagtttcaccgaactgcaaaaatgtataatcataaatcccagcaaaatcttcagcagcctgatccgtgagcttatacatgatgtctgtgtttccgttgttccgctatatcccgtagggtcagcgagctttccccactttccaagccagtaataaccgccttgcgtacaatctcatcgtaagcttcttgttgctccagcaaacgcagcgccgaacgtataacttcactggcatttccataacggccactttcaatcatgtgctgtacgaaccggtcaagctgttcacccatactgacagtagtaatttttctcatatctcaccaatgtattaatagttaatacatcaagtatgcagtaaatcaggccgcattaccaacgttctgaagccccgaaaaaatcggggcttatgtcgatgtggtcaaggtctggacacttattttaataaatccttttattacaatatgttatgctttaaaagcaaacaccatcctgtctttcaggccctttttagaactttttttcagtcatttacaacgtatttctttgtaaaacaaaaacataaaaaagtatgaaggggttagaaagtatacgaaagtttttgagtgtggatgctcgccacaatatcagatgcgccttccagaaaaatttcgcgagcaattagaagaacaagcgtgtagagacggtgatttttctcttgtaacatggatcaagcggattttgcgtaaagaactacgggaacgaggtattgaaccgaaaggttgaatcttgtgaaatgccaagaggcacccattctaggtgcctcttgttttgaattgctctaacacctttatatgtgggtcttagcctaccgtaatttgaacaggttttcctatacgggttaacatattaactaatgcgtcaatggtgaatttatttacctttttattcacaacgtcagatactcttggacgagaaatgtgcaacaccgttgctacttcagtttgtttcatttttttatctgcaatccataaagtaatttcttccattagctgttctttgatttgcaatgtattttctatttctcgtaaagaggttgcatgaagttgctgagcctcttgctcagtaaaacctaactcagaaaatatattatgtccggctggagttaccctacgaatttcagtgtcaattttagtggtcatttgatatttctccgttgctggataactgcgttgtatcgtactttagcgatatccttatcatgtttactcgtttgttgagtttttttctgaaaactatgcaatacataaatagcttcatcgaatttagcaacatacataatacgataaatacctgtattgtctcttagccgtatttcttttacgccagaaccgatgtcagaaaagggtttccaatcttcaggatctattccatgctgtattctatgaagctgatagcctgcgtctttacgtgcatctgtagggaaggctaacaaatcttcaataagaagagccaatccaggcaatttctttccctgtaccgctcctgattttcgtcatagttttccttccttacctgattgtataaaattttatacaattctgtgcaaagttacaagaattgtcgcttcatttatcgtgcgcggcatgagtcttttgattactcaaggatgaacatctctaatactctttttatatcctccactttgtgctatccctgatacttacccaatcaactgaattttattgtcacagtgatcaccatggcgaaatcatcattacgggagtctttcgctatggcacaagattatcatcatggtgtctgcgtgcaggaaatcaacgagggcacgcgcactattaccactgtcagcaccgctattgtcgggctagtctgcacagcggatgatgctgacaccaaacctttttccttaaacatgccagtcttgttaaccgatgttctgactgccagtagtaaggccggtaaaacgggcacattgttccatgctctgcgagcgattgccgaccagtccaaacccgtgactgttgttgtgcgtgtggctcaggggaaaactgaagcagaaaccacgtcgaatatcattggcggcgttaccgacgagggcaaaaaaacgggaatgcaggcgctgcttgcggcacaaggtcagctcggcatcagaccgcgtattttgtatgattattccccatgagggctttgttaaaaaatttctcccgcaaagggcgtaagcttcttgttgctccagcaaacgcagcgccgaacgtataacttcactggcatttccataacggccactttcaatcatgtgctgtacgaaccggtcaagctgttcacccatgtagtagttcaaaccttaactgagcagcattacctcatttagaggtggctttttacgatgcaatagtaagtttgatttcttttattccacaaacgctagcatattttaaaattctctcaatgcttgccctatctgcgtttttttcaagtcttgaaattgtgggaggcttaactcccattctttcggctacttgtgcacttgttaaccccgcctgttctctccatgatctcatttcctcttgcagttgaatatgtaggtctaaagtctgttttgtttcttcaaatgctttgataaattcagggtttttctctcttttctttgcttccaatttttcgcggaaagtcattactttactcatcttagatcctctcttttatgcattttaatcatgtctttttttctatttatagctgtttgtttgtctcttacgtctgttttttgtgattttttaataaagaaactaagcatgtaaatagtgttcttttcttccccgtagcaccatgtaccccgtgctatgttgtctccgttacttgttcttaattcaaaaattttgtttcttttttcaagtagtttgcagtgtggttctcgtaaatcatgcggtttatcagataaagtgtctatcaacgcataaaacttaccttgtaattcttctgataatccatctatttcagagtttgcggatggatggaaaaaaatttctatcatggttaatctcccatttcacagcaaatattagcctttagggtaatatagatcaagaggtaattttgtatgtaatgcaatttaaaggcagttgtaagatcgggagattagtgtacttgttgtagtgatagttaattttgattaagattttttatgacgctctgaattgataagtcccaattgaactatacccaaaaagttgagcattcctttaaataaatccttttattacatagtgttgtgttgtgaaaacgaacgctatctctgtctttccctctgccttctagtggtcaatgagtgggcacttgttgaaataaattctgttatttcaaattaatcaacaaggagagattgatgtcacctccgtttctcgctcctcctatcggcaggtttttttattgttgttattctaaccaatcctgtttatcttatttcatttaacttaagtagatttgattgttcatttgtgctcaaaaagggaaaaggtatgtctggtaacgaggtaaaagatcggcgtccgatcaaaacacgcaatgccgtgtgggccagtaagatggctaagtggttgcaatataaaggggcgacaccaaatggcatatctgttgccagcgttgtttttgctgtattcgctggcgtgtgttttgccgtgtgttttttagtcgagtctttttggttgacttcaattttattgattattggtgccttgcttattcaaggccgactaatgtgtaatttattggatggcatggttgctgttgaagggggattgaagacggctgccggtactgtttttaatgatcttcctgatcgtattgctgattcttttattctgattggggtggggtatggtttaacactttttccatttgcgatttctcttggctgtattgctgcattattcgctgttttgactgcttatattcgcttgttaggtgggacttgtggtttacctcagcgtttcctggggccgatggcgaaacagcatcggatggcattaattaccgttagttcaattgttgccgcttttttacctcagttatggagccagtatcttttattggcggtattagtcgttatcacgttgggttgtctctggacatgtattcggcgaaccagagtcatattgaatgaattacaggagaaggatgcttgtaatgaataaaccacaagaagtgacactggtaagtaaaggtatgggttcgtttctgtctgggctttgccgtttgttaacaggagtgagaattcgttggattgggtgtaagccatcggtagtttcccgaatttattatgctaatcatagcagtcatctggatgggttagttatttgggctgggtttcctcgggtgttacgttctcgggtgcatccagttgctgcgcgtgattattggagtaaaacttatctgcgcagatattttattaataaagtttttcgggctgtgcttattgatcgtaaaggagaagattgtttaaagggaaataccctgacaccaatggaggatgtattaaaacgaggcgaatctttaattttgttcccggaaggaacgcgagggagtggggagcaaattaataagtttaaaggggggctatattatttagcgaagaaatatcctgatattgagcttattccagtttatctggaaaatttaaacaaggttttgccaaaaggctcggcacttgttgttcctgttatttgctcggcaacatttgggcaacctttggaaaagttaggtgcaaaagaggaaaaagctgactttttacagagagctcgtcaggcattggaggcgttaatattatgactatgcttaataataaactaatcctgttgttggggggaatgttcgtgccgttaattattgccagtattgttggtgcaatactctcctccaaatattcaatggataacagtaatgcgacaatcgataatctgaatgcccgcatccgtggctggtgggggatgtgtattatttgtgtgttgtcggtgattattgggccaattggttcagtgttattatttgcgagtatgtcatttttcgctttacgggaatttttcactttgacaccaacacgacgaagtgaccatgaggcgatgttctggtgtttctttattttcatgccattgcaatacattgccgttggtattgagtggtatggcgtgttttctattttcattcctgtttatgtgttcctgtttttacctgctcgtattgcattagcaggggatacaacgaactttctggaacggacagctaaaatacagtggggaatgttagttgctgtattctgtattagccatgcccccgctttattgatgttagatattcctggttatgaaggggagaatgtcgaattattgttgtttttaatgattgtggtgcagatgtcagatgtcttgcaatatgtgtttggtaaattatttggtaaacatcctattgtgcctaaattgagtccgaataaaacagttgaaggttttgttggtggcattttggtttcagtgttattaggaatgtcactttattgggtaacgccattttctccgtgggaggcaggtttgatgtcattagcgattacgctgatgggctttattggtggcttgtgtatgtcggcgataaaacgtgatagtggcattaaagatttcggtgaaatgattgaaggtcatggtggcatgttagataggatcgattcgttatgttttgccgccccagtctttttccatctgacacgttatttttatacataaagattaaataaaagatcatttaagggtgctcttaaatgatctaatgttgaattatataattgtatgaggtggtgtatggcatatcaaatcttaacaaatacagtggcgagtattaccgatctaaaacgtaaccccttgtccagtgtgagcggggatattaaatggttttttagctaacttgatctcaaaaaagggacttattgttaatacagacttggtttttaccgtattatatgaaaagttgaatcaattcagcttgattgtttcagtacgtcggatggtaacaggttaaaaaggcagatttctcaggcaaagtgatcgcatacggagtccgccgttagcgggtttgcaattaattacatctacaagtcagaggtcatcatgagcaatgagatcaaaagaatcggtgtcttaacgagtggcggtgatgcgccgggtatgaatgcagctattcgtggtgtggttcgtgcgggattaaccgaagggttggaagttttcggtatttatgatggctatcttggcttgtatgaaaaccgtatgaagaaacttgaccgttttagtgtatccgacatgattaaccgtggtggtacttttctaggttcagcccgtttccctgagttcagggatgagaaggttcgtactgtcgctattgagaacatgagaaaaaatggtcttgatgctctggtcgttatcggcggtgacggttcctatcttggcgcgaaaaaactgacagaagcgggtttcccctgcattggcctgccgggcactattgataatgatgtggcgggtaccgactataccatcggctatttcactgcgctggaaactgtggttgaagcgattgaccgtctgcgtgatacctcgacttcccacaaacgtatttccattgttgaagtaatgggacgttattgtggtgatctcactttgtcagccgctattgcaggcggttgtgagtttattgttttaccggaagtctcatttagttgtgatgagctcgtagctgaaattaaagcgggtatcgataaaggcaaacgccacgccatcgttgcaattaccgaacatgtttgtgatgtttatgaacttgcgaaacatatcgaaaaagagacgcatcatgaaacccgtgccacagtcttaggccatgttcagcgtggtggttccccagttgcctatgatcgtattctggcttcccgtatgggggcatattccattcaattactgttggaaggttatggtggtcgttgtgttggtattcagaacgagaaacttgttcatcatgacatcattgatgcagtgcaaaatatgaaacgtgtgtttaaacaggattggttggaaaccgcgaaaaagttgtattgatcacgtcaatactggcaaatctaaatctgttgcagcctcgttggaggctgtaatttatctttagatattcctttcacatataaataaatgcttttaattatttctgagtgataacgctttctgtcagccttgaatttcataacagttaaaacagcttgtggagagattcaaatgaaagtcagatggcgtgtggcattggcgttactattgattaccaatagcagcgtctgggcaaaagatcttcaacttcttaatgtttcctatgatccaacccgtgagttatatcagcagtataatcgggcttttagcgattattggcagcagaagacaggggataaagtgataatccggcaatctcatggtggttcgggtaaacaggcaacttctgttatcaacggccttgaggcggatgtggtgacactggctttggcctatgatgtggatgccattgcggaacgtggccggatagcgaaagcatggattaagcgtttgccagagaattctgctccctatacttcaactattgtttttttagtgcggaaaggtaatccaaagcaaattaaagactggtcagatttagttcgtccaggagtatctgttgtgacacctaatccaaaaacatcgggcggtgcacgctggaattatctggctgcatggggttatgggttgattcataacaatcaggaacaggacaaagcgaaagcatttgttaaagccctttaccagaatgttgaagtgctcgattctggcgcaagaggagcgaccagcacttttgtcgagcgtggcatcggtgatgtattaattgcctgggagaatgaggcattattagcgattaatgcgcttgataaagataaatttgaaattgtgacacctagtctttcaattctggctgagccgacggtttctgttgttgataaggttgttgataaacgtcatagccgtgagttagcaacagaatatctgcaatacctttactcacccgttgggcaggagatagcggctaaaaactattatcgaccacgtgataaagtggttgccgataagtaccgctcttcttttcctgcgttggaattatttactgtcgataagatattcggcggttggggtgaagctcaaaaagtgcattttgcgactggcggtgtgttcgatgagattattcagcgataaaaatgagtaaccgccgtagatgtacggcggtcaattatcgttgaaatatgaattaggcttttttcgcagcggctgcggcttttacgataacagcgaaagcgttagcttttagagatgcaccgccgactaatgcaccgtcaatgtctggctgagagaatagctcagcggcattatctgcgttcacagagccaccgtactggataatgatttgttgtgcgattgctgcatctttctgcgcaatatgatcacggatgaatttatgcacagcttgagcttgtgccggtgttgctgatttgcctgtaccaattgcccaaacaggttcgtaagcgatgaccgcaccttggaaggctgctactcccaatgtgttcagaactgcatcaatttgccttgcacatacactttcagtttggccggcttcattttcctgttcagtttcgccgatgcacaaaacagggattagaccttgttgtttaagaatggcaaattttttcgcaatgaattcgtcactttcttggtggtaagtacggcgttcagagtggccgataataatgtattctgcgccaatgtctttcaacattgtggcggaagtttcaccggtaaatgcaccagacaggttaacgtcaacgtcctgtgcacctagagcaatgcggctgccagccagtgcttgtttagcctgagagagataaagcgctggtggcgcgatagcgacgtcacagccggtaacactgcttaattcttgacgcaggccagtgatgagttcgttaaccatatgggtgctgccattcaatttccagttacccataactaatggatgtcgcatgttttttcctccaatcagagaatgtttaagtagtgagttgaatgaaattcattcttaagattgattcggtagttcggcgctccacagtatagtgatcattgccaacaatagcttttttttattgctaagtttgattagttatcgggttcaaataaccatagcttaatcggttcaatagcgaaagtaagcgttttttcactactatttactacaatatagcgaatagcgccgatgttgtggctgtaaaatggcgattttttgctgtttatgagtaagttatcaatattctctttgctttgttcctgtgaaagcgttgggttaaagtggcgcattagggcggtcatgtactgctctgccagcatttggttttgctgagtttcagcggtattttctgatggtagtaatgtcagttgcaggcttttgattttttcgcttcctcgctcaagtacggcggaagaatagagtttttcattgattttgctggcagctcgtgtcagtggcggataaatgtttttacttatgattacccgatattcgcgtagtggcaatgtcgggttgcagcgattatatttttcgcgaaatcgcgggatagtttcatcgaaagagggggcattaggcagaagataggtcgcttgtactgtgggttctgtggttgtggatttatcagcattggctaccaatggcaaaccgacactgcttgccgctaatattatggctagaaatttattaacgtccattttcatgttgccgctcgcttaggttaaactgcgctggaaaacagaatacacgattggaaaagaatagatgacattacaacaatggggtttttcattcaaaggacgaattgggcggcgtgaattctggattggcattggtgtttgcctggccttgatgtttgttatcttgactattcagggtatgagttctttgaccatgcactatgctgtttttgcacttgtcttggtgatgtatcccgtagcggcaatgatggttaagcgtctgcatgatcgaaataagcggggaggttggtcgctgcttttattactggcagggttgttggttgctgttgactggggtggcctggctccgttctggcaatgggggatcggccgttttatccccacattgatcattgtaatgatggtgcttgattgcggtgtattccgtggtacggatgggccaaaccgatttggtgaggcgacagagaaagtggattttatttctgtcaaagatgattgaaattaccaatattgttcactggtgatatgccccggtttgcggcgtaagtgttttgccattccacgctgctcttttagcagttgctgggtatctttcaccatttgagggttaccacataacataatatggctgttgtcactgctcatcgtaagtccgacagcggactcaagttcgccattctcgatcaatgtcgggatacggccagtcaatgagccgaggttttgttcacggctgacgatagtctgaattcgtaacttgccattgagacgttcaactaattgctgcattaagggcagatagcttaaatcttgtgttagtctgacggcatgcaccaatacgatgtttttgaatctatccagatgatctccttgctggaggattgacagataagggccaatggcggtccctgttgaaagcatccataatgtttcacaatcaggtatttcatcaagaataaaaaagcctgcggcttgttctgttactaagagatcatcacccggttgcagagctgctaattgtgggctgagtttgccttcaggaaccgtcactaagtagaattcaagattattatctatcggggcattaacataagagtaggcccgttgtacccgttcatcatctatttccatcgccagttttgcaaactggcccgcagtaaatttttcaaccggtgcatgtatcctgatgctgaataaggtattcgtccagtgaataacttgtgtaacttttcctgtaacccagtttgccattggaacttatctcctatcccgaaagaaatctccgaacagttcgtttttacgtcgctattttagtcctatagagataaataccattatcgattctgtgtcatagaaaaattaaccattagtttattaatgcttggtttatatgtacatatttgttgccagatatggcgtaattgactgtaattttttctaaaaataaaattgtgcactatttttttctttggtacaggaatgctgatgttctttacgtcagttttgatcttgctttgttggctgcactcactcaccccggtcacatcattatctatgctcccggagattcgctcccttgccgtcgcgatgcatcttgaaatccattgggtatagtaaagaaagggtggtaatttcaccctttctttatattagaatgcgttagcctttatcttcccaatcctgcgcacgggcaactgcttttttccagccattgtatttgtaattacgctcggtggtttcaatacccggacggaattctttctcaatggtggctttacttttcacttcatccaggtctttccagtagccaactgccaatcctgcgaggaatgctgcgcccaatgctgtgctttcacgcaccacagggcgttctacccgggtgccaagaatatctgattggaattgcatcaggaagttattggcaacggctccgccatctacccgtagtgcttgcagccgggtgcctgcatcagcttgcatagcatccagtacatcacgggtctgataggcgatagattccagcgtcgcacgaatgatgtgattactgttggtaccgcgggttaggccgaaaattgaccctcgggcgtaggggtcccaatagggggcaccaaggccggtaaaagcagggaccacatacacgccgttactatttttaactttagtggcaaaatattcggagtcagccgcatctgcaataagtttcagttcatcacgcaaccactgaatagaggcaccaccaacgaaaaccgcaccttcaagcgcatagttcacttcgccgcgaggaccacaggcaatggttgtcagtaggccgtgattggagcgtacggcatctgtacccgtgttcatcagcaggaaacagcctgtcccgtaggtgtttttcgccatacccggttggacacaaagttgaccatatagagcagcttgttgatcacctgcgatacctgagatagggatccgagtgccgcctttaccgccgatgttggtctgaccataaatctcagaagatgaatgaacgctaggcagtagggaacgagggatttgtaattcatcaagaatatgctgatcccactccagattgtgaatattgaacagcatcgttcgggaggcgtttgtgaaatcggtaacgtggactcggccttgagtcattttccataccagccaagtatccacagtaccgaataggagctcacctttttcagcccgttcacgggcacctgcgacgttatctaagatccattttactttggtgccggagaaataagggtctactaccagccctgtattctggcgaatatattcttccaatccctctttttgttttagtttagtacacgcgtccgcggtacggcgacattgccaaacgatggcattgtagataggtttaccggtctctttttcccaaataatcgttgtttcacgttggttggtaataccaataccggcaatctgatcagaactaatatccgctttcgccaatacttctaccagcgttgagctttgggttgcccagatttccattggatcgtgttctacccaacccggtttaggataaatttgcgtaaactctctttgggaaattgagataatattggcgtcgtgatcaagaattattgctcgggaactggtggttccctgatcaagggcgacaatatactttttctcaatcatattttctgttgtcatgataataacctgttctggtaatgctctactttaggctttctttttcttctgatcttcagtcttgtgaacatcagatggtaaattgcgaccaataagtttgcggtagccaaatgctcccacaataccgccgataatgggggcggtcagagtaaccagacagtaagggatttcacgcccacccgtcagggcaatatctccccaaccggccagataagcaattaatttgggaccaaagtcacgggctgggttcagcgcgaaaccggttaatgggccaaatgcaccgccgataacggcaatcacaataccaatcagtaacggggccagaggaccgcggggaataccattgccatcgtcagtcagcgacagaatcaaacagagcagaatggcggcaatgataacttctatcataaaagcctgagaaatggacagtgacgccattgggtaagtagagaatacacctgcggtaaacaggctttctggcgtaccacgaacgatattgtgtacctgttcgtaatcaaggaatacgctgtagtacatcatgtaaatgagagcggcagcgatgaagccaccaatcatttgggcaataatgaaagggataacctttttgccatcaaagcgggcaaacaaccatagggcaatcgtcactgccgggttaaggtgagcaccggaaacacctgcggtgagataaacagccaacgcaacgctcataccccaaataatactgatttcccataagcctaattgtgcgccggcaatacgtgctgcggcaacacagcctactccaaggaaaaccaatagtgcggtaccaagaaactcagagatacattgtccggttaatgtcgtgctagtggtttggctcatatgttctatcctacaaagaagattttagaggcgtaattattattgtcacctttcagaaattgaaaaggggattatgtaaatttatcgttaatgcgcggaaacgagaaatagcgaaattgaaatgtgtgtgttgtgtcaacaaaatgagcgaatccgcatttatccgctattttgctaaaaattaaagtgtgagacactattgagctttttatttggtagttatttttcatgtgttggggatgttgctagacaggggcgctttggctacatacaatcagacaattgcttacaagggggaaccgagaatgtcatttgaagtttttgaaaagctggaagccaaggttcagcaggcgattgatactattaccctgctacaaatggaaattgaagaattaaaagaaaaaaatcgatctttgtctcaggaaattcagaatgcaaccagcggccgtgagtctctggctcatgaaaatgagcaattaaaacaagagcaacaagtatggcaagaacgtttgcgtgccttgttaggcaaaatggaagatgttcagtaattgaaatttccagcagacaaaagaagggcgatctgaaaaatcgcccttagttttatatcatcagatgatctcatcttcttcgttgtcatcaagttccaacggttcttcagacaaaatgataccggtgttatcggcatacaaataatcgccagagaagaaggtgacaccaccaaaattcacccggatatcgcttgcgccggttccttcatcacgacagccagccggaatagcggctatagcttgaatgccgaggtcgaactctgctaattggtcaacctgacgtacagcaccgtaaacaacaatgccctcccatccattttgcacagcgagttgtgccagctcagcgttaattaatgcttggcgtacagaaccaccaccatctaccagtaaaatgcgtccatgaccgttgtcttcaagcaggtcgtaaagtagcccgttgtcttcaaagcatttaaccgtgatgatttgaccaccaaatgaagtacgcccgccaaaattggagaacataggctctaccacatttacttcttcttgatagatgtcacaaagctcggaagtatcatatttcataggatttacgtctggttaaggtatggaacggtaagtatatccctttcaggccaatgttagcaaaatcatcaattattaaattgatattgttaacaggtacccagaatgattaagttacaacaccttcggaaaaacagcgcaaatactgtctaattaaaaataagaccaactgaaaatagaatattagtcaataatgccgccttaaccatctgtcccagcattggccgcattccctctggtgtgggttcattaagtacataccacatatgtttgaacaaccaaggcagagcgagcaggaacaaccagcttgaccagccagacgggttttgtatggtgaataataccaagcagagtattgctgtaattattaaacatccgtgataataacgggcttttttagggccgagacggacagctagggtgtttttgccatgccgtctgtcatcttcaatatcacgcaggttattgatatttaaaacagcagcagagagaagaccacaggctgtcgccgggagtatgacaactgagtcaaaaaaacctgcttgaagataataagtaccggcaacacttaaccagccaaagaaaatcagtactgaaatatcgccaagtcccatatagccataaggttttgcaccgactgtataggtaattgcggcaataattgctagcaggccaagtgccaaaaaaccgaatatatcgctaggttcttcacaggcaacagcaatcaaggcgctaccagacaggcaagttagcaggacaataatcttcagcgcttttttcatctgtgagggggtaataatgcctttttgcataccacgtagtggcccgatacgcttttcagtatcactgcctttgataacatcaccgtaatcattggcgagattggacaggatttgcaatatggctgctgttaatagagccagtaaggcaaccggtagcttgaaatgccctgtccaggcagcaagggctgagccagtaataatggcagcaagggcgagtggtagcgttttaggacgcaaactttccagccatgcttgagtttgactgatagaagttgatgagttcatttctgcgttcacttactcctgtaggcttataaaaaacgaatgggaggcaagcctcccatcattaattatagcggatcagaaatcgtatataccgattataggataaagcggctcagatcttcatctgcaaccaattcatctagatgctttttaacatagtcggcatcaatatcaactgattgaccacgacgttcgctggcttcgaaagagatatcttctatcagccgctcaagcacagtatgtaggcgacgggccccgatattttcggttgattcatttacctgccatgcggattctgcaattttgctaatgccatcatccgtgaaactgatgatcataccttccgtttccatcaatgctttgtactgttccgtcagggatgcactcggttcagtcagaatacgctcaaaatcttttgtagtgagtgcctgtaactccactcggatcggcagacgcccttgtaattcagggatcagatcggaaggactggcaacctggaatgcacctgaggcgataaacaggatgtggtctgtttttaccatgccgtgtttagtggataccgtacaaccttccaccaatggtaacaggtcacgctgaacaccttcacgggaaacatcagggcctgaagtctgacctcgtttgcagattttgtcgatttcatcaatgaagacaatgccgtgttgttcaacggaatcaatagcctgttgttttaattcttccgggttaaccagtttagaggcttcttcttcgatcagtagcttgaaagcatctttgatttttagcttacgagatttgtgtttctgaccggcaaggttctggaacatagattgcaactgatttgtcatctcttccatacccggaggtgccatgatctcgacgcccacaggtgtggtagcaacatcaatttcgatttctttatcatcaagttgaccttcacgtagtttcttacggaatgcctggcgtgcggctgatggctcaacttgtgtctccgtttgtccccagttattttttgctggtgggatcaagacatccagaatacgctcttctgccagttcttctgctcgataacggttttgttcgatggattgcaggcggaccattttaaccgcggcatcggtcagatcacggatgatagagtcgacttctttaccaacatagccaacttcggtgaatttggtcgcttcgactttgataaacggcgcatttgccagttttgccaggcgacgggcgatttcggttttacctaccccagtcgggccaatcattaggatatttttaggcgttacttcgtagcgcagcgtttcatctagctgcatacgacgccagcggttacggagtgcgatagctacagcgcgtttcgctttatcctgaccaataatgtgtttgtcaagttcgctgacaatttcgcgtggagtcatttcagacatactatctacccttacgcttttgaaggaagttcttcgaagttgtgattatggttggtataaatgcagatatcaccggcaatggttaacgctttctctgcaatttgtctggcgccgagatcggtattctccagcattgcccgtgcggcagattgggcgaatgggccaccggaaccaatggcaattaggtcattttctggctgaatgacatcgccgttacctgtaatgattagggaggtattttcatctgcgactgccagcagagcttccagtttgcgtaacatgcgatcagtgcgccagtctttagcaagttcaaccgctgctttggtcagatgcccttggtgcatttcaagtttacgttcaaacagttcaaacagagtaaaagcgtctgctgtaccgccggcaaaacccgcgattactttgtcattatagaggcggcgaactttacggacattgcctttcatgacggtattacccatcgttgcctgtccatcaccaccgattacgacttggccattacggcgaacacttacgattgtagtcacgagtaagcccttggttacaaaaatagataaatgtgacgcacggtactttcgacagggtatacggctatcgaaaataccgtgtgcacggtgttagcagtatagatgggggagaattatcatttttcaaccccctgtaacacggagaatgcaacctgatacgccagcgcctttcagacgttcccgcattttttctgcggtgtttttactgtagggaccaagaacaacacgatgccagccgtctcccgttgtgatctggctttcaatacccgcaaatgccagattggcacgtactgattcagcttgatccatattgcggaatgaaccacattgtaaaatcatacgctgtgccttttctacgggcttaggtttactggtttcagccggtggtagagtttgtggctgaactggctgagtctgcattggttgttgtggtaacgtttgttgaggctggggttgtggtcttgcttccagcggtttttgtgtctccgctgatggcttgatgattacttgtgaacgcggcacttgaacgccattgtatggcacttctggcagcgaagtcgtcggttggcgcatatccgcctgcatttgttcaagtaactgccgttgctcggcggtcaactgggtttgtgaattgatttgccccccggatgagggatcacgtggtgtctcaacgccaacggggcgattttccaattctttgatatagcgccagcgttcttctggttttggcggtaacccattgttttgttgagaatgttttggcagtatttctggttcgcttttctgtttattgtgggtaataaagtaaaggccaccaataaagatagcgactaaggctaccgcgacggccagcgttgcttttggcagcccttgggcttggtattttttcttatcggtatttttacggcgggtgtttgaacgcccgcgactcacataatctcgttgtgccactgtctaattcgctgagtaatttaagtaaaagaaaataaacgatatgttacttaacctgcggttatttgactagcttttaggcgaacaggtgctttgccgaataattaattccgattccagtaactgagacccgccagaagttgtgtgaccctggatttgatctagcaacagtaacatggccttgtgaccaatttgataactgggctgtccaacggttgtcaacggcggatcgctgtacatggcgagacttaagttatcaaaaccaatgattgataaatcttccggtatttttaagcccattcttttagcctgccacattacgccaatcgccatgacatcgctgtggcagaagatggctgtaggaggatccagcagagagagcaactgttcagtcagctttgccccgctttcatgggtaaagttaccttggacaatataatcttcacgaattgtcccaccagagcgacgcaatgcttggatatatccctgacggcgatagcggcaaatcggtatattttccgggccggagaggcaggcaatgcgtttatgccccaatgtttgtagataatgagtcgcattgaatgccgcggtcaggttatcaatgtgaatagtcggcagctctagctctggtgaaaattcgtttgccattaccattggtggcaggtttttttgttcttctttgctggcatcaaacgggatattcgaacccagtagtaacagaccatcaatttgtttggtggcaatcaggttgagaaacgcgtgttcctgtttttgctgatgttggcaatcaccgattaaaaccagatagccatgttgttccgctgtctcctcaatgccgcaaatcacatcagtgaaaaagggatcgctgatatttggcactatcactaaaatagtttttgactcaccgcgtttaagattacgggataaattatttggataataacccacagccagtacagcttgttccactttttgtcgggtctgggaagaaaccttttctggattcatgagtgttctcgatactgttgcggtagaaacgccagccacttcagcgacatctttcattgttgcggaggtgccattctttttctgctccaaaactcactcctcatttcctgactgattagttaaatgattgtcattttctggttgccgggaaaccgtcagtgactttaaggaaagtaacgacatgcggtttaaggttatgacaatgttattaagagatcattctaaacagtttggcaaattcatttattccttagtttgtaaaaaagtgtgatataaatcatttattcgatatggctcgcaaattagtgagtaatttttcattgattacggattgtcgggtgtgattttttaaatagtaaataagagtatgtttaatctgctcaggttatgtgttttaaaatagaggcgattaattactaactgtctgttggatcaacatcgatattccatttcacttttcgggtttgcggtaaggctgttatctgtggataaaccagtgccatgattttttgtaaaacagttctggatggatgttgaattaatagttgccaacgataacgaccacttctttttgactgtaatgcaggaaccgggcccatgatccataagttatcatctcgcaaagggtggtgttcaaaaagtaggcgtagttgttgtaaaaaagcaggtgcttgctgattatcgtgatcttctgaccgcaagataatatggctggtaaatggcggcaaaaatacacttttgcgttcatccatagcttgaatagcgaaagcatcgtagcctttattgagcaaaatttgcagtaatggatggtcaggatgatgagtctgaagaaccacttctcctcgtttaccagcccgaccagcccgaccagaaacctgtgtataaagttgtgcgaaacgttctgctgcccgaaaatctgctgaaaacaaggcaccatcaacatcgagtaacgcgaccagtgtgacatcaggaaaatggtgaccttttgccagcatttgggtgccaatcagtatacgggcatttccggcatgaatgtcagccagttgttgttctagtgttcctttgcggctggtggtatccctgtcaatgcgggtaacgggtacattagggaatagggctgaaataccgtcttcaagctgttctgtgccaaggccaacaggttgaagatgagtagaaccgcattgcgggcactgacggggaacggggcgcaggctatcacaatgatggcaacgtaactggcgatggtattgatgcagcgtgtaataatggtcacagcgttggcattctgcaatccagccacattcatggcagagtagggcaggtgagtaaccgcggcggttaaggaaaagtatgacctgattattggcttgtagatgttcttcaatacgttttattagtggttgagataacccgattttgagtggtaagccttttaagtccaacagatgctgagtcgctggctgagcataacctgcccgtttggacaatgttagcgggcggtatttgccttgttgcacattgtaaagtgtttccagtgctggagtcgcagagcccattatcactgggatattctctttttttgctctgaataccgctaaatcgcgggcatgataacgccagccctcctgttgcttataagagctgtcatgttcttcatcaataatgataatgccaaggcaggcgaaaggggtaaatagggctgagcgtgtaccgatgacaattgcgttctcaccttgtcgcgctcgtagccatacagcgagacgttcactgtcattcagggctgaatgaagaacatcaaccggtgcgttgaaacgttcacggaagcgacggatggtctgtggtgtcaggccaatttccggtacaagtatcagcgcttgtttaccttgttccagaatattttccaacacactgagataaacttctgttttacctgatccggtgatgcccgccagtaaccagggagagaattgctggtcttctgcacggatagcaccaactgctgtggcttgttcggtattcaatttcaggcgttcgccggtgatttggaagtgattttgccagttctcagattcaggttgcacagggtataaaccgataagtgacttctttttgagcgattggaaagcactttcgctcagttccagttctgtaatctgatggcgatatattgctttacggcgcagggttgccagtacttgctgctgttttggcgagcgtttcagttgcgccagcggtaattcagcgcctgttggcgtgacttgccattgccatagtggagttgattccgcgggttttccctgacgaagcagcaccggtaatgcatggaacaggacttcaccgatggggtaatggtaatagtcggatgcccagagcaataattgccaaagattttctggaaataaggagtgagtatcgagaatggattctatggttttcagttgttctatcggaatatcactgtggtcagttatcccagtgacgataccaatcgctttacgtttgccaaaagggacgattacccgcactcctacaacgggtaattgactctctgcgggtagcagatagtcaaaagagcgggtaagagggacaggtaaagcaacctgaacaacagccataaaattattccgaacgatcaataaataaagtaaaaattggctatagggtatcatagacaatatacggatttcattgcgagataggtagatattctgtatgatccgccgcctttggtacggaagataccaaactcattttatcaacacgacgtgtggtgtctggcggcaacagggctggatagcgacacggccttaacagaggttatcccatgaaaaaaggtattcatcctaaatatgaagaaattactgcaacctgctcttgcggtagtgtaatacaagtcagatctaccgctggtcacgctctgaacctggacgtatgcggccaatgccacccattctatacgggtaaacaacgtgatgttgctactggtggtcgtgttgatcgcttcaagaaacgtttcaacgttccaggtgtcagcaagtaattgcagaattgcgcctgtctgtaataacaggccaactgatactaacgcccggtgttttacatcgggcgttttgcattgtagccatataaaaaacccctgaatttttacaggagttttttcgctactatcaatattcccaagtatcaggatcaatacctaattcccgcatgatttttttggcttcctctgggatttcatcattacgctctttacgtaaatcagcatcatcgggcagcggctgcccagtaaatgcatgcaggaatgcttcacacaacaattcactattagttgcatgacgcaggttattgacctggcgacgagtgcgttcatcagtgaggattctcaacactttcaacggaattgagactgtgattttcttcacttgttcgctttttttgccatgttcagcataagggctgacatattcaccgttccactcagccatggggtaccttaaatagtcgtaaaatcataaaattaagccagataacagcaccagctttcgttgtgacatattgccattttatcgtgatttccttatcaattatacagttatagtatatgcgataaactaatggctactaataaataaagcagcattagttatgatgaataattatcccattgtctaatctaaccgtaaagaggtttagatgtctagatgtgttgacgtctactttggtagcggatattcttctctgacttaatttatgacagatagtggtagctgatatgacacgcaagccggcaacaatagcagttcgcaatgggctgaataatgatgaacagtatggttgtgttgttccgcctatatatctttccagcacatataactttactgattttaatcagccaaggacacatgattattcccgcaggagtaatccgggccgcgatatggtgcaacaggcattagctgagctggaggggggagcgggtgctatcatgaccagcagtggaatgtcagctattcacctgttatgcatggttttccttcaacctggcgatctgttggttgcgcctcatgactgttatggtggcagttaccgtttatttgacagccagactaaacgcggtgcttatgaagtggcctttgtcgatcagagtgatgaacaggcattaaagcaagtcttgtccaaaaaaccaaagttggtattgattgaaacacccagtaatcctttattgcgtattgtcgatattgctcatatatgccagctttcccatgaggtaggtgcgacagtcattgttgataacactttcctgagtcctgtactacagaagcctttggcgttgggggcagatctggttgtgcattcctgtactaaatatcttaatggacattctgatgtgattgccggagctattattgcaaaggatgaagaggttgcaacggagctcgcttggtgggcgaataatattggtgtaaccggtgcggcgtttgatagctacctgctgttgcgtggcatgcgcactttatcgccacgggtcctgttacagcaaaagaatgcattggaactcgtcaattatcttcaacagcaaccgttagtgaaaaaacttttttatcctgctttgaaagatcatcctgggcatgaaattgcttgtaagcaacaatttggttttggcgcaatgataagctttgagttcgatggtggtgaacaggcgatacgccgttttctgtctgagttgaagttatttactttggcggaatcactgggcggtgtggaaaccttaatttctcatacggctaccatgactcacgctggaatgtcagcacaggcaagggcggaagcggggattacggattcactattgcgtgtttctgtgggtattgaagatagtcaggatttaatcgctgatttggaaaatgcatttcaggcagtagtaaaggagtgaccatgggtgcactggtagttgcaacggcggaaaatgaccgccaattacataagtttggtggaagtagtctcgcggatgtgaaatgttatcaacgggtagccaagattatggctaattacagccaacccggtgatttaatggtggtatccgcggcaggcagcacgactaaccagttaattaattggcttaaacttagccagagcgaccgtatttctgctcatcaggtacagcaggttctgcgccgttatcagcaggatctgattagaggtttgctacctgagactgttgctgaagagttggtgaagcgttttattgccgatcttgaaaagctaagtgcattactggataaaccagttagtgatgtgacttatgcagaagtggtggggcacggagagatctggtctgcgcgtttgatgtcggctgtgcttgaagctcagggtattcctagcgcttgggtggatgcccgccagtttttacgcgcggaacgggcggctcagccgcaaattgatgttaccctttcccaaccattgctaaatcagttgctaacacaaaatctaaataaacgactggtggtgaccggttttatctccagtaatcatgatggagaaacagtgttattggggcgaaatggcagtgactactctgcaactcaggttggggctttggcaggggcgaggcgggtaaccatctggagtgatgttgctggtgtttacagtgctgatccgagaaaagtcaaagatgcctgtttgttaccactattacgtttggatgaagccagcgagcttgctcgtcttgccgcacccgtgttgcatgctcgtaccttacagcctgtttcctttagtgatattgatttgctattacgttgcagttaccagccggagcaaggatcaacgcgtattgaaagagttttggcttctggaactggcgcaaaaattgttactagtcacgatgatgtttgcctgattgagttgcatgtggccgctcatcataattttaaacagacatacaaagatattgatctgttgttaaagcgagaacaaattcgcccattggcgacaggcatccatctagactgtaatttgattcagctctgttacacctccgaagtggtgaatagtgcactgagtgtgctggaagatgctacgcttccggggaaactttcccttagagaaggtttggcgctggtggcactggttggcgctggtgtatgcaagaacccattacattgccaccgtttttatcagcaacttaaagatcagccggtagaatttatctggcatgcggaggatggcatcagccttgtcgctgtgttgcggactaatcagactgaacatgtgattcagggattgcatcagagtttgttccgtgctgaaaagcggattggtctgattttgtttggtaaaggaaatattggctctcgttggttggagttattcgctcgtgagcagaaaaacatttcggctcgcagtgattttgaatttgttctggccggtgtggcggatagtcgccggagtttactcgactatcaagggattgatgctagtcgagcgttagctttttttgatgacgaagcgacagaatatgatgttgatgaattatttctctggatgcgagcacatccttatgacgatttggtgattctggatgtgacggcaagtgaagaactcgctcgatgttacagcgattttgccagctatggtttccatgttatcagtgccaataaaattgcgggtgcttccagtagccgcgattatcgttttattcgtgatgcatttgccaaaacaggtcgccattggttttacaatgcaacagttggcgctggcttacctatcaatcataccgtgagggacttacgggagagtggtgataccattttgtccattagtggcattttctccggcacattatcttggctgtttctgcaatttgatggttcagtaccatttagtgatttagtcgaacaggcgtggcaacagggattgacagaacctgatccgcgtattgatttgtctggtcaggatgtgatgcgtaaattgattatccttgcccgtgaagcagggtatgagattgagccagagcaagtgcgtgttgagtcactggtgccgaaagaagcagaatcaggctctattgaacaattctttgataatagcggtgctatcaatgagcagatggtacagcgattagccgcggcgcaggaaatgggcatggtgctgcgttatgttgcccgttttaatgcgaacggtaaggcaaaggtgggtgttgaggcggtacgtcctgatcatccattggcgtctttgctaccgtgcgacaacgtgtttgcgattgagagccgttggtatcgtgataatccgttagtgatccgtgggccgggggcaggccgtgacgtgacagccggagcgattcagtctgatcttaaccgtttgtcacaactgctttaagctttcgaacctccactgactaaatcagatgtgatttccttcgcttgatatttgaggtaacgagaggggggatgtcctgagcagggcatctttcctcattgctgccttagctatcgatccactaagccgatataaacaaagccaaagattcattgatgaatttttttccgattcatggtgaatattcctcaccgatttaactcaaatttgttgttgactaaaaaatgccgatccttcatcttattttggacgtctaaacgtataggtgtttagatgtgtaaataaaagtaactggcaaattattgatatgggaaattattccgcttgttaacgaggtgcaggatatgagtttttttcacgcaaatcagcgagaggcgctgaatcagaatctggctgaactggaaggacagatccgtgtttcatttgaattctttccaccgcgcacagccgagatggaaaaaaccctgtggaaatccattaaccgcctgagcaccctcaagcctaaatttgtttccgttacttatggtgctaactctggcgagcgtgatcgtacccatagcataatcaagggaataaaagagcaaactggccttgaagcggctccgcaccttacctgtattgatgccagccgtgatgaattgtgcgaaatcgcccgtgattattggaaaaatggtattcgccatattgtggctttacggggtgatttaccggaaaacagtgaaaaacccaaaatgtatgggtctgatctggttgagttacttaagaaagaagcggattttgatatttccgttgcggcttaccctgaagttcatcctgaagcaaaaagttctcaggctgatctgattagcctgaaacggaaaattgatgcgggtgcgaaccgtgctattacccaattcttcttcgatgtggaaagttacctgcgttttcgtgaccgctgtgtgactgccgggattgatgtggaaatcgtaccgggaattttgccggtatccaatttccgtcagcttaaacgttttgctgtaatgactaatgtgcgtattccaagttggatgaccagaatgtttgatgggctggatgatgatcctgaaagcgcaaatttagttggtgcttctatcgcaatggatatggtgaagattttaagccgcgaaggtgtgaaggattttcatttttataccttaaaccgcgcagaactgagctatgcaatttgtcatactttgggtgttcgtccttaatctttggctcttactaaggatatgccttggtgagagcatgtttttttatctgttgtatctttataaagcttaaatttttattatctcgttggataattaggattaatatgttgttgatatttattttatagagttgaatggggggtaaggatagtaataaataaaactttgttattaattaaattatttaatatatacccgtaatcattgaagatgcttgattttatccgaaatggagatcattatcctcgctatgaaaatatttattacatcagaacaaaaaatcaaacttgaacgtcttcacgacaccactcgcgatggtcaagtacgagacagaatataaaagctatccttctggtttctgaagggtagagttctatgatgatagcccaggcattgcgactccatcagaccactgttgaccgccatatcagttatggctggatgcgaaaaggtgagaaaaaaacagtcaaaacaacaggaagccggactcgcctgaatatattgggcgcgctcaacctgaatgccattggtcgtacggtgttccaagaatatcaaaccatcaatgatgacagcatttgccgttttttcaatgaaataagaaagtcttatcctgactaccatcaaaaaattcatcttattgtggatggggcgggttacaacaaagctcatcttgtgaaggagtgggcttatgttagcaatattgagtgacattaccttccgccatacagcccaaatttaaacccgatagagcgattatggaaggtcatgaatgaacaggttcgaaataaccgttatttcgcggatgaacatgaatttcgagacaaagtattcaaatttttcaccacaacgctaccggatatagcggactcgctgatgtctagaattaacgaccattttcaggtgctaaaaactgcatcttgaagtttcttgggtatatacccgttatctttcaagttgcttctttgttggctgcactcactcaccccggtcacatagttgtctatgctcccggggattcgttcccttgccgccgcgatgcatcttgaaatccatagggtatagaagcaatttatgagatatttatagaaggtaaattttaaattaactttaggtttctatattatttaagtttaatttatatggtttttggtttatatttacttatttacttatttacttatttacttatttacttatttacttatttacttatttacttatttacttatttacttatttacttatttacttatttacttatttacttatttacttatttacttatttacttatttacttatttacttatttacttatttacttatttacttatacccgtaatcattgaagatgcttgattttatccgaaatggagatcattatcctcgctatgaaaatattcattaccgatgaacaaaaagccgaacttgaacatctccatacacctgccgtgatatgagggagtgtgatcgcattaaagcggtcctgctggcctctgaaggctggagttcagtgatgatcgctcaggccctgcgtcttcatgaaatgaccgttaaccgtcatatcagcgattaccttaatcaaggtaaacttaaatctgataatggggggtctgatagtttgctttctcaagaacaaactgattttttaatcaatcacttatctcaacatcttttccatcacacccatgaaatcgtggcctatgttgctcagctctggaatattacctttagcattcccggcatgaataaatggctacaccgtcagggtttttcttataaaaaaccttgtggcgtccctcataaattcgacgcagaaaaacagcgacaatttattgaatattatgagaatcttaaagtcacagcgaaagacgaacccatcctttttcttgatgctgttcacccgactcaaggcaccaaactcggttatggctggatgcgaaaaggcgagaaaaaaacagtcaaaacaacaggaagccggactcgcctgaatatattgggcgcgctcaacctgaatgccattggtcgtacggtgttccaggaatatcaaaccatcaatgactacaatatttgctgttttttcaatgaaataagaaagtcttatcctgactatcatcaaaaaattcatcttattgtggatggggcgggttacaacaaagctcatcttgttaaggagtgggcttatgttagcaatattgagttacattaccttcctccctatagcccaaatttaaacccaatagagcgattatggaaggtcatgaatgaacaggttcgaaataaccgttattttgcggataaacatgaatttcgagacaacgtcttcaaatttttcaccacaacgctaccggatatagcggactcgctgatgtctagaattaacgaccattttcaggtgctaaaaactgcatcttgaagtttcttgggtatatttacttatttacttatttacttatttacttatttacttatttacttatttacttatttacttatttacttatttacttatttacttatttacttatttacttatttacttatttacttatttacttatttacttatttacttatttacttatttacttatttacttatttacttatttacttatttacttatttacttatttacttatttacttatttacttatttacttatttacttatttacttatttacttatttacttatttacttatttacttatttacttatttacttatttacttatttacttatttacttatttacttatttacttatttacttatttacttatttacttatttacttatttacttatttgcttatttgcttatttgcttatttgcttatttgcttatttgcttatttgcttatttgcttatttgcttatttgcttatttgcttatttgcttatttgcttatttgcttatttgcttatttgcttatttgcttatttgcttatttgcttatttgcttaataagtatggagtaccgaattatcggtggctggataatgtaattccatttttgctttgttggacggcaaagcgttgaaggtaatcgtcaagctcgtttactccagaagtgaaagccttgtgttgatggtagcttggatcaaggaattgctcttcaaacacgtttcaccttgcgcgcagcatttattgcattttgtaaagcagtattgggagtgaaagcgtcattcaaagcggttgtgaatgcctgaaaatcctggactgtcattgttagattatcttggtttaataagtaaagtccgccataagccttcgtccagtatgaactgttatgcttcaataatcccaggcacctatccccagataatccttctcttctgacacctaaaacagataaaaatcgggtcacttttttacataagtagggtaggaaaaatactaagatgaccttaattaattcaatttatgttggaaaaagttatgccaatttcatccattagcggccatacgctgcttagccaaacgcaagttcctcagcacgcagcagcttctcccctacttgaacagggtaaccgcttgttcgaacagtctgtccgacgtggccctctgcacttccagagctcggatctcaagcatttgatcaccgaattgcgccagttgcagagtgctcccaacagtgcgcaggcccaacgggtgcaggatgctatccagcattgggagagccaccaccctaaagaggtggcggctcgtagtacccgccttgccgagcttaaacaggctctggcagaacaaggcgctgtggtgcgtaccctccagccaaaggtgacgacgactagccctcaggccatgttaaagcaggctatgccagccttacagaagatggaaacttatgcatgtactgatggacttacattcgtcggaaagcacagctctcatcgtcggcaggttgaagagagattggattcatttgggggcagtcagagtcgcaaggctgctaacaaacaggccaatgatatgtccaatatggcggctattgccgctaaacgaggaaacgtcagtcttaaccaactgaaatctattgccgcctgtgtcgctcaagcccaagctggttgctgcacgacttttgcctactccgcggcagccgagctgatgaagcacaatcaagataaccagcagcgcattgaggtagtcgctcatcgtggtgccaaggggcatagccagacccactgctttgtagtggtcggtcgcgatcccaacagtgaactcagcaaacccgaaacttggggtaagcaagcacacgtcatcgatccttgggctgcgaccataggtggtaggttgcaaggcacgccgagtaatccaccgatcgctaacctgtggccgccgactgaatctgtgtttgacaaccataaagagtaaccatgtttaatgccttattatcggaactgtgccgacgccttgggcagaccgaagaatctctgcatgcggaagggctcgatctacctctcggcccttttagtttgcatatccgccaacgcgatgagttggtaactttgtttattccactaggtgatgtcgaaccttgttcgttggctacattggccgattggccatcattgcaactgagccgtagtggtgagggagagactctgctctggagccgtgaatggttggagaggctggatgctgagctgttgaccaacttggtcgagcggatgttacagcaagctagggaccttacggctacggcacctatcactgaaagccaagaatggccgccgttaagtattcaagggagttcgtggcataaagtttaggcgaaaaaccttaagaagctttaagagattaatcaggtgtattattgtaagccacgagcgatattattttgtgcattcgttgattaatgactttattactgggtacaggcacttctacagagggagcctaacggaaataatttgtgaaaaattcacagaagtaaacttttaagttaatttaatataattacttaattacgaggctaaaccatcggcgtcgatatctattcgtaaaaatgaacaagggcggtttcccgccctttacagactcttaagcgggtttcagcagtagatcaaagaatgctaatctgcgttgacatggtatttcgaggccaattagcggaagtgttctggtagctgaagataccgttctggtagccatcgaggctgtattccttaaggaaaccaaccacaatttggcccgcagcacatggccaattgtagtacccgtttgtgatgcaaacaggtgtagaagagtacagcgagtatggcagtgcgccgccgttcatccaagcaaaggagttatagccgtagccaacttccagaacggcggcgcggagctgctgtcctccatgattgcagtttgtcaccggcaagttggaagtgtattcccatccgcaattcgttgagccaacggcatagacccacatattggttagcggaggtgcaggggcgtaagctaccccagatttaatgtcgagctttttatcttcttcagcccgaataggactctcagggttaggcagtagctgaggttgagctgccagggcattttgagcagtagggacctccttcggttgctctgtttgggcataggcattaacgccaaacaaggaagcaagagatagcaatatggcaagtttatttttcttcacgactgaatcctcttagaaatggaaaagcacaattctagggaagtgagagaaaatcacattattaaattttatttatgtaatgatcgaaatttttgcgggggttattgcttccgtgcttattttactgcggaaaaagggttggataagtgataagggatttttcttaaattaggcttcgtctggtgaaaaatggcttctttttcgttgtctattgagcacatgttgtacggggttgtctggagaaaaaagataccggtactgtgctcaatagtgttactaccgtcgtgcggagattgtctcctgtctgactgcgactaacctgtatttcgcattcctgctgcgataccggcaatggtgaccatcaacgcttgttcaacctgtggatcagaatattgctgttgacgggaacggagtaatagttctacctgtaggacgtttaatggatcagtgtaaacattacgcagggcgattgattctgcaatccacggtaaatctgccattaggtgttcatctttggaaatggctaataccgtcttaatatccgcggagagttgcttgcgcagtttctgacctagcggccataagttcttatctaccagacgatgatcataatattctgccaaccacaaatcagctttggcgaagaccatttccaacataccaatccgagtggtgaaaaaaggccaatcacggcacatttctgctagtacatcctgtttcccatcatttacaacttgttgtagcgcggcacctgcacctaaccaggctggtaacattagacgattttgtgtccaggcgaaaatccacgggatagcgcgtaaactttccacaccacccgccggatgacgtttggctgggcgagaacctaaaggcagtttggctaattcctgttctggtgttgccgcgcggaaataaggtacaaaatcgggctgttcacgcacataatcgcgatacatcttacaggaaacatcagatagggtatccatcacctgatgccattctggtttaggttccggtggtggtaggaggtttgcttccagaatcgcactggcatacaaggctaagctactgatagtgacctgtggcagaccgaatttaaagcggatcatttcgccttgctcggtcacacgtaggccacctttcaggcttcccggtggttgggaaagcagcgctgcatgtgctggcgccccgccacggccgatagtaccgccgcgaccatggaataaggtcagcgtaataccctctttttcacaaacattgatcaaggcatcctgtgctcggtattgtgcccatgccgcagccatcactccggcatcttttgctgagtcagaataaccaatcatcaccatctgtttgtcatgaatcagttcgcgataccattgaatattcattaattgctgaatgatattttcagcattattcaggtcatcaagggtttcgaacaatggggcaacgggtaaagtgaacggacaaccggcttctttcagtagcaagtgaactgctaatacgtcagaaggtgctttagccattgagataacgtaagcggcgatagcgtcttgcggtgactcggcaatcactttacaggttgcgaaaacttcttgcgtttcagcgctcggctgccagttgtgtggaatcaatggacgtttggagtgtaattcatacagtaggaaagcctgtttttcttcttctgaccaactggcgtagtcacctaattccaggtattgcgtcagttcagaaatggcagttgtatggcgagtgctttcttgacgtacatcgatgcgtaccagcgataagccgaaacaacggatacggcgtaagatatctaataattgaccgttggcaatgatttccatcccgcaggtttttagtgactgataacaggcgtaaagtggttgccaaagctgttcgttatccaccagcaaatcagttggtggcagaacttgctctcctttcagttgcttctccaaataggtcaatgtattgctgagttgtgtccgcaattttttagcaatttctcggtaaggttccagaatttcatcacccccagctagtttacgaacttctggtgtgcattcagacatggagagctcagaaaccagaacctgaatatcttttaggaatagatcggctgctttccagcggctaagcagtaatacatgacgagtgacttcagcggtgacattcgggttaccgtcccggtcgccgcccatccaagaagtaaagcggacaggtaccgcttcaactggcaggctgtaatcaattgactcttccagttgttcattgaattcacgcaggaatgctggtacaccctcccacaagctgttttccaccatagcaaacccccatttcgcttcatcaattggggtaggacggattttgcggatttcatcggtatgccatgactgggcaactaactggcgcagacggcgcataatgttgttacgctcataatccgctagatcatcgtgatcgagttgcgatagacaggtgttaacggctaccagtttatggatcaatgtacgacgagcgatttcagttgggtgagcggtgagaaccagttcaatagacagttcatttaccgcttttttcagatcgccattattgaaatttttttcttttaagcgagtgaataatttcgctaacgcaacggggttgctggcagcttcaccatgcggggagatactgtgatattgttctgcgacgtttgtcaggttgagaaattgattgaaagcacgggcaactggtaacagttcattattagataggttttgcaatgtagataatagctgctggcggtgtgcttcattacctgcgcgggatgatttggataatttgcggatagtctcaactttatcgagaatatcttctcctaaagcttctttgatcgtgtctccgagcagcttacctagcatgctgacattactacgcattgcagaatattgttggttcatgtgactcttagcctttattgctggcagaatgttgattctgtttctgtagaaaaattttatttaagtggcgggaagttattttttgtggcgccacagtgttgcattgaccctaagccctcatattcatatcagaaaataatcagtttgggcgaaatttctaaaatttaatggcaggtcatactctataagtattgcttatgtatcagaatgcttgggaggagtacttttgttgattgttatgatgcttgagtccccctgacttttgggggacgagtaaaacgattaattattgcttagacaaaaatgatctattaactgggaaattatctttctggtaggtccaataaatgacatatcaatgaactcatccggttgatgtgcttgttcaatagagcccgggccaaggactaaagttgggcatactttctgaatgaagggtgcttcggtacagtaattgaccgtttcagctttgcgccctagcagtttttcaatcacgtcaaccattttgtgatcggttggacattcataaccgggaataggggaatgtaattcatcgatagttaagcggccaggccaacgttgcttcattggttctagcgcttcatttagcagtccgttcagatcctgtagcgttagtcccggtaatgggcgaatatccatatgtaattcacaatgggcacaaatacggtttactgcgtcacctccatgaatatagccgaagttcatggttgggtatggaatggtaaacgccgggttgttgtaatgctcttttaatgtattgcgtagttcaatcaggtgaccaatagattcgtgcatcaagtcaatggcatttataccacgatctggatcactggagtgcccggattggccaacaatgcggatagcgtttgataaatgtcctttgtgtgcacagataggatgcaatgaagtgggttcaccaataatagcgaaatctgggcggatagtggtacttgcggcaaaatagcgggctcccgccattgtcgtctcttcatctgcggttgccagaatgtacagcggacgggttattttgctgacatcaatgtcccgcaacgcatcaataataaaggcgaaaaagcctttcatgtctgctgtacctaaaccgtacagtttgttatcgcgctctgtcagggtgaaaggatctttcgtccagagaccttcgtcgaagggtacggtatcagtgtgtccacacaatagtaatccacctgggccacgtcccaatgtagctagtagattgtattttccgagggtttcggggacgggctgtatctcaatttcgaaaccaatttctttcaaccaacttgccagtaggttgatgagagactcgttactttggtcaatactgatatcggtggcactgatagatggagtcgcgattaattgccgaaatagctcaataaatggaggtaatttaatattcactgttgacagcctttattcatgatagtatcaatattcatgcattttttttgaataaaaatacattatcccgtttaaatactgagcacaaggtaacgatatcctatgttgaatacgctggttgttggtgcaagtggttacaccggagcagaactggcagcatatctgcatcgtcatccgcatatgaatctgattaggctcatggtttctgctcagagcgttgatgcagataaatgcttctcagatttacatccacagtataaaggcattgttgatctaccgctgcaaccgctgactgatattattaatgctgctaaagggattgatgtggttttccttgccaccgcccatgaagttagtcatgacattgcgccgctatttctggcagcaggttgcactgtatttgatctctccggtgcctaccgcgtacaaaatgctcagatttatcaacaatactacggattcaaacataagcatactgaatggttagcacaagcagtatatggacttgccgaatggcaggctgaaaacatcaaacaggcccaattagttgctgtaccgggatgttacccaacagtttctcaactctgcctgaaaccgctgttggaaaatagtttgctggatatcagctattggccggtgattaatgcgactagtggtgtaagtggagcaggccggaaagccagtatgaccaacagtttctgcgaaatcagtttgcaaccttatggaatatttacccatcgtcatcaaccggagattgaggaacatctgggaaccagagtggtttttactccacatcttggcaatttcgcccggggtattcttgccacaattacctgtaagttgaagccgggtgttaccgcagaacagatagatgaggtgtatcgtcaagcatacaaagataagccattggtaaggctttacagcaaaggagtaccagcattgaaatccgttgttgggttaccgttctgtgatattggttttgttgtacagggtgaccatctgattgttgtaggtactgaggataatcttttgaagggcgcggcagctcaggcagttcagtgtatgaatatacgttttgggtttgaagaaactcaggcattactttaattattgacgtgaaggagtagagcagatggaacctttagtcataaagttaggtggcgtgttactggacaatgaagaagcattggaacgtgtgtttactgcattgcaggaatatcggcaaacacatgaacgccagttggttgttgttcatggggggggatatctggtggatgagctgatggagaagttgcagctaccgatagtgaaggaacaaggattacgagtaacacccgctgatcagattgggattatcaccggcgcattggctggtatcgccaataagaccttgttgtcgtgggcgactaaatatcaacttgcatcagttggattatatttaggagatggtaatgtggtcacggtttcccaactgagtgaagagttggggcatgtgggaaaagcgatgccgggcgatgctaagttgctgaaaacgttattggatgcgggttatatgcccattatcagctcgattggggtaacggataaaggggagctgatgaatgtgaatgccgatcaagcagcaacggcgatagctcagacgctaggtgctgatttggtattgctctctgatgttagcggtattttggatggtaaagggcagaaaatccctgacataaatgttgagaaagcagaacagcttattgctcatggcatcattactgacggtatgattgtgaaggtgaatgccgctctagatgcagccaggacattagatcgtccggtagatatcgccagttggcgtcatgcagatcaactgaccgatctatttaacggtgttcccgtcggtactcgtattctggcttaaattaagtttgattaattttcggcaaagctttgctgataaataacaacggaatttcaaagggtaacttcatgcatactaaagatatcaaaaaaatcgttcttgcctattctggtggtctggatacttctgccattattccttggctgaaggagcattatggcaactgtgaagttgttgcgtttgttgctgatgtggggcaaagccgtgaagatttggaaggcgtggagcagaaagctttgcgttctggcgcgtcagaatgtcacgttgtggatctgcgtgaggaattcattaaagattatgtttatccggtactgaaaaccggtgctctgtatgaaggtagctatttgttgggcacttcaatggcacgccccattattgctaaagcacaggttgaattggcactgaaagtaggagcagatgcacttgctcatggtgcaacaggtaagggtaacgatcaggttcggtttgaaagcacttatacggcattagcccctcagctaaaagtagttgcaccgtggagagagtgggatttacgttcccgtgaagcgttgctggattatctgaaagcacgagatattccaaccactgcaacattggagaaaatttacagccgtgatgagaatgcgtggcatatctctaccgaaggtggcgtactggaaagcacttggaatgcatccaataaagattgttgggtgtggacagtcgatccagaagaggcaccagatgaagctgaattggttagtgtcatgattgagaaaggcgaggttgttggggtcaacggcaaagtaatgtctccatatcaatgccttgaagcgctgaatattctgggagtaaaacatggtatcggtcgtatcgatatcgtggaaaaccggctggtgggaatgaaatctcgtggttgttatgaaacaccgggaggaaccatcatgatggctgcgttgcgtggtgttgaacaactggttctggaccgcgatagctttaaatggcgtcagcagcttgggctagaaatgtcttatgtcgtttatgacggacgttggtttgccccgctacgtcgatctattcaggcagcggctgagacgttggctgcggatgtcagcggtgaagtagtactgaaactctataaagggcaggtaacagcgatccagaaaagatcaacaaatagcctttattctgaagcgtttgcaacgtttggtgaagatgaggtttacgatcacagccatgcagcaggatttatccgtctgtattctctcccttcgcgcattcgggcattaaatagtaaagagtaatttcatcgttcgtagttatggaggtaatgaccagatcgtgaattcatccttgtatttgatttttcgagtctattatctccatgttgcgaatgaaattgctgtttatgaaaggtaatcaatcactcagacatcagataatcaggaacaaaaatatggcactctggggcgggcgtttcagtcagaaagcagatcaacggttcaaacaatttaacgattcacttcgctttgattaccggttagcggaacaggatattaccggttcagttgcatggtcgaaagcgttgataacggttggtgtgttgaccgttgaagaacaacaaagattggagctggcattaaatgaattgctgaatgaggttcaggctaacccacaagccatcttgcaaagtgatgcagaagatatccatagttgggtagaagggcagttgatcagtaaagttggtgggctgggtaagaagcttcacactggtcgtagccgtaacgatcaggtggcaacagatcttaaactttggtgtaaagaatacatttcacatctccatcaggcaattgtggaattacaacaggtattggtgatcaccgcagagaagaatcaggatacggtgatgccgggttatacccatctgcaaagagcgcagcctattacatttgctcactggtgcttggcatatgtagaaatgttggtccgtgatgaaaatcggttacaggatactttaaaacggctgaatactagcccgcttgggtgcggtgcattggctggaaccgcttatgatattgaccgcgaacaactagcatcatggctaggttttgcttcagcgacgcgtaacagcctagatagtgtttcagatcgtgaccatgtattggaactgctatctaatgccagcattagtatgatccatctttcccgttttgcggaagatctcattttctttaatagcggtgaagcaggatttattgaactgtcagatcgagtcacttccggttcttctctgatgccacagaagaaaaacccggatgcactggagttaatccgtggtaaatgtggccgagtgcagggggcattaaccggtatgatgatgaccttgaaaggtctgccgctggcttataataaagatatgcaggaggataaagaagggttgtttgatgcgctggacatttggctggattgtttgcatatggctgcgttggtgttagacggtattcaggtcaggcgttcacgttgcgcagaagcagctaaacagggttatgctaacgcgactgaattagctgactatttggttgcaaaaggggttccattccgtgaagcccaccatattgttggggaaattgtgatgatggcgcttactcagggtaaggctctggaagcgttgccattgacagagttgcagaagttcagcagtgcaattattgaagatgtatatgatattttgtctctgcaatcttgcttggacaaacgccttgcaaaaggtggcgtatcgccaaaacaagttatgaaagcgattgtagaggctaaacagaggctaaaattaagttagtcatcgtcagcagtggggattaatctatcccctatggatttcaagatgcatcgcgacggcaagggagtgaatccccgggagcataggtaactatgtgaccggggtgagcgagtgcagccaacaaagaggcaacttgaaagatgacgggtatatcccctgtaaaataagtgagatctttatatataagtttttaaggattatctgatagtcttttcctcacattgatataattatctattggtagtttctatcatttatattaaatatgttgaggtgggaatgaatatccgcgatctggaatatcttgtggcgcttgcggagcatcggcactttcgccatgctgctgattcttgccacgttagccagcctacgttaagcgggcaaattcgtaagcttgaggataatctgggggtcatgttattagagcgcaccagccgtaaagttttgtttacgcagcaagggatgttattagtagaacaagccagaacagttctccgtgaggtgaggattttgcaggaaatggcatcacttcaaggggaaaatatgtctggtcctctgcatattggcttgatcccgacagttggtccatatctgttgcctcatattatccctaggcttcatagtttgtttcctaagttggaaatgtatctgtatgaagcccagactcaaagtctgttagcccagttggatagtggcaaattggactgtgcgattctggcaatggttaaggagacaagagatttcattgaagtgccattgtttgaagaacccatgaaactagctatctatgatgaccatccttgggcggagcgtaaaaaaatcgctatggatgaattggcaggtgaaaaattgttgatgctagaagatggtcattgcttgcgtgatcaggcaatggggttctgttttcaggctggtgcgaaggaagatacccattttcgtgcaaccagtttggaaaccctgcgtaatatggttgctgccggtagtggaataaccttattgcctgatttggcagtgccacaagagaaaaaacgtgatggcgtctgctatctggagtgtaacagccctgaacctaagcggtctgttgttttgatttatcgtcctggttcacctctgcgtggtcgctatgagcaacttgcagaggctattagagctaaaatgggcacttattacgggcaatcaaaatagccggttaaggccgtttaaagccgcgacacggtaggcttcagccatagttggatagttgaaagtagtattgacgaaatattcgatagtattactttcacctttctgttccataattgcctggccgatatgaataatttcagccgcacgttccccgaaacaatgaatgccaagaatctcttttgtttctctgtggaacagtattttcaggcttcctacgttcatccccgcaatttgtgcgcgtgcaagatgtttaaattgtgcgcgtccaacttcataaggcactttcattgctgttaattgctgttcggttttacctacagagctaatttcaggaatggtatagatacccgttgggatatcttcaatcagatgaacttcggcgtttcctttcgtcatcgcttgggcggcaattcggccttgatcataagcagctgaggccaagcttggatagccgataacatctcctacagcgtagatattttcgttgctggtttgatagatcttattaactttcagtaaaccgcggctatctgcttctagaccaacgttttttagccctaaagtatccgtattacctgttcgaccattagcataaagcagacagtcagctttgacttttttaccggatttaaggtgaacgataacaccatcatcaacaccttcaattttagaatattcttcattgtggcggatcactataccgctattccagaaatggtaagaaagtgcatctgacatctcttgatcaaggaaggcgagtaagtgattacgagtgttaatcaaatcaacttttacgcctaatccacggaagattgaagcatattcgcaaccaatcactccggcaccgtaaataatgacatgccgtggctcatgatccagtttcagaatggaatcgctgttataaatacgggagtgagtgaaatcgacatctggcggacaatatgggcgagaaccagttgcgataataatcttatctgcgcttaaaatatcgtggttatcgtcagcatagcgcacactcacccggtggtcatcaatgaatgttgcttctccggaaaacatacgacacccattacgttcgtaaaatccttgacgcattctagtttgctgattaattaccatttcagcacggcgcaggatttcagcaaatgaagagcgaagaacgcgggaattatcactgtacagaggattttggttaaattcaataatacgactgacggcgtggcggagggctttagacgggatggtaccccaatgagtacaaccaccgccgacattattatagcgttcaataacagcaacgcttttaccctgtttcaccaatcccattgctgctccttctccaccgggaccagaaccaatgacaatggcgtcaaaatgaatatgttgcatagaggaaagacctgtttttacacaaaattacaacgctatattaacattggttgacttaataacccaatcatcataaggagtttatgtcatcgtttagggtgaattgaacatagttttacccgttatgctgataccatgaagtttttggaaaataaataattatctaacgatcgaattagcaaaggggaaatgctcctttaatgattttctgactacgcgtagtcacctttatcatcttaatatctaataagaaaatgcgctgataaaatgacatggatcattataaatgacatgataagcatatcattacggcaaacgtattaaaatttggtatatttcctaacatgtagttcagataaagagtcaggattcgtgtgagtaacattatcggcatcagagcgaaacagaaagaaaaaactcgtcgttcactgattgaagcggctttcagccagttgagtgccgaaaggagttttaccagccttagcttgcgtgaagtcgcccgtgaagcaggtattgcacccacttcattttatcgtcatttccgcgatgttgatgagcttgggctcactatggtggatgaaagtggtttgatgttacgtcagttaatgaggcaagcccggcaacgtattgctaaaggtggcagtgtcatccgcacgtctgtttcaacttttatggaatttatcggtaataacccaaatgcattccgattattattacgtgaacgttcagggacttctgctgaatttcgtgccgctgtcgcacgggaaatccaacattttattgctgagctggcagactatttagaacaggaaagctgtatgccgaggcattttactgaagtgcaggcagaggcaatggtaacaatagtattcagtgcaggtgcagaagcactggatattgatttggagaaaagacagcgttagaagacgtttagtcttgcagctacggatgatgctaaaggtgcatatattgggtatcgcaaagaaatgaacccaccgaaccctaaacttaaataactatgaaggaggagaacgaaatgatggaacaatatcgccaggacaaaagtacattgttactcgcttttattgtcggattagcaacgaatggaacattttcagcagtttttagctcagttgtttctttttcagttttcccattgataacattgattttatcagtttattgtatccatcagcgctatttgaattactcaatgccagatgggatgcctaagttggttgtcgcctgtttcctcttaggattatttagttatagtgcgattatcagggttgaataccctgaaattggctctaattttctgcccgcagtaatgggtaccgtactggtattttggatttacagaaaggtaaaaattcgtaaaaaccaggcaattacagaaaattgtcattaattgatgaaaaacgccggagagatctatctgccggcgtttttgctttatatgtttgtcaagtatcagtttaatttttccagaagcacgccgcattccatatgatgagtataaggaaactgatcaaacagagccagatggctaattttatgcgtttgggttaatgtctccagattatggcaaagggtttccgggttacaggaaatataaagaatccgtggatatgcccggaccatctcaagtgttttttcatcaaggccgctacgtggtggatcgacaaagatagtttcacattgatagctttttaaatttattccctgaaggcgattaaattcgcgttcaccattcattgcttgggtgaattcctctgctgacattcggataatttgtacattatcaataccattggctgtaatgttgtattgagcggccgcaacggatggcttggcaatttctgttgccaatactcgttcaaaattttgagctagtgccagagagaaattgccattaccacaatagagctcaagtaaatcaccttttgaatctttggtaatattaattgcccattcaagcatatgaatattgacgctagcatttggttgggtgaagctgttttccacctggcgataaatcatttttcggcctgcgacaggtaaaacctcatcaatataatcatgatccaatgtgattttggttttagcggctctgccaattaactcaacgtcaaaccctttatgtcttaacgcttcacgcagtcttaatgcttgttgtgtccattcttcccccaattttttgtgataaagcagagaaacaaggattttattactgcaagtagacagataatcaatttgaaatagcttatgacacaagatctgttcagatctaatggagtcaattaatactaccatcattttgttgattaacttactggcgacagggaattgaacaaggcgaatacgttgtttcgtctgttgatcgaacataatatggtacaaatcatcctgctcatgccagattcgaaattctgctcgcattctgtaatgagatagcggtgagcggaaaacctctggcctcgggggctggaaaggtgccatcatgttttttaaacggctgactttctccgtcagttgctgttcatagctttccgttggcaggagattttgcattatgtttgttctcttatatctgtagtaagaaaaattttcgtgcaaaattgtagggaaagagcaaagaatgtccagttttcttattactcatacacgatcctgtctatgcttactattatgaataggctcaacgcttcatcgtagcgtgtccttctaacaataaattgtgggatgttttctctcatgataaataaaaagcggttattattatccactgtttcaattatggtgatttctggctggaatcaagcttctgctgcggtggagtcgcaggattcattggttgtgacggcgagtcgttttaaacagccgatatcaagcatattggctccttatactgttgtaacacgagatgaaattgatcgttggcagtcaaatagtgtagccgatattttgcgtcgtttacccggtgttgatattgcgcggcatggagggattggacaattaagctctttgtttatacgtggtactcatgctagtcatgtattagtactgatggatggaatacgtttgaatcaagcgggcatcagtggctcctctgatttaagccaaatacctgtatcattggttcagaaaattgagtatatccgtggaccacgctccgctgtttatggttctgatgctattggtggtgttattaatatcatcactaccagagagaagctaggaaccagccttaatgtaggtatcggctcacatggctatcaaacttatgatggtgcaactcaacaaacgctagctgaaaatacagttctgacagcagcagctaactatacttataccaaaggatacgatgttgttgctgatggtaataccggtggttttagacaacctgatcgtgacggcttcatgagcaaaatgctttggttaggagtcgatcaaaaatttaatgagcaagtcagtggatttgttcgagcttatggctataacaatagaacatcttatgatgcggatattaattggagttatccatatgccagaccggatactcgtgaactttatagtcgccactatgacatgggagtcagatttaaccaagggatctactcatcccagttaattacaagttatagtcatacaaaagactataactttgatcctcaatatggacgctatgataagtctgctagccttaatgattctgaacaatataacttgcaatgggggaatacttttcagctatatcagggcatagtcagtaccggtgtggatttccaaaaacaatcgatagaagctggaaccagttatattccgaagagtaaaacggtacgtaatacaggaatgtatctgacagcacagcaacaactgaaagattttattttagaaggtgcaattcgttcagataaacattcagaagctggctggaatacaacatggcaagccagtttaggttgggagtttattaaagattatcgcttgatagcctcttatggtacggcatttaaggctccaacgctcagccagatgtacggttttggtggtaatcatgatttgaaaccggaagaaagtaaacaatgggaaggcggtatcgaaggcgtcactggccagctaacttggcgtatgactgtatatcgcaatgagattgagcaattgatcgattatgcgaatagccgctactacaatattggtaaagcgaaaattaaaggtgttgagtggactggcttaatagacactggcatgtttcagcatcaattgacaatacagtatattgacccccgtaatagtgaaactaatgaaattttagttcgtcgtgcgaagcagcaagtgaaatatcaacttgactggcagttatatgattttgattgggggttaacttatcaatatctagggcggcgttatgacaaggatttcagtacatccccggctaagcgtgtgaaattaggtggcgtcagcttttgggatttaacagtttcatatccagtcacttcttatctgacaattcgtgctagaatagccaacctgcttgataaagattacgagacagtttatggctatcgcattccaggacgtgaatactacctcactgggagctataacttctgatttaaataaagccgcacgcccaacagttttagtgtttgattctggggtaggcggcttatctatttaccaagagatccgacaattattaccagatctccattatatatatgtttttgataacgaagcattcccttatggtgaaaaatcggaagagtttattgttgaacgagtcgttcaaattgttggtgctattcagcaaaaacaccctctgacaatagtggttattgcatgtaacactgctagtacagtcagcttgccagctctgcgtgagcggttcagctttccggttgttggtgtggttccagcgataaaacctgctgcaaagttaactcgtaatggtgtcgttggattattggcgactagagcaacagttaatcgttcctatacaaaagaacttatcgaaaagtttgcgacaggttgcaggattgaatctataggttctgctgaattagtagaattagctgaaattaaactgcatggtggtaaggtctctcccgatattttaaaaaagatactgaaaccgtggcttggaatgaaaaaaccacctgatacagtggtattgggttgtacccattttccattattagcagaagaattagttcagatattacctgatggcacgcgtttaattgattctggtgttgctattgctcgaagaacggcttggttggttaaacatcagaataatcttgtttgcacttcagcagatagtcttgcttactgtatgaaagtgaatactgatactgatgcattaatccccgttttgcaggagtatggattttcaaaactagaaaaattgataacttaagttaaatttgatggaataatcatcggtcgttaacttttttcaaaataattattgccagcgtcaaagaacgccctataatgcgccaccactgaccgacacaacgctgataaacattgtgaggtcgggcagagaaagcgataatcagtgcttgactctgcgggcgaacagcgtagtatacgcagcccggctgaacgagaatgttattttttatgtcagcctgctctttaacaattaatcagacaatctgtgtgggcactcacaagaccgtatcacaaaaaaatacgttttaaagtcttgaagagtgaacaacagttaattcattacgaaataattagtcaggaattctttgagcatcaaactttgatttaaattgaagagtttgatcatggctcagattgaacgctggcggcaggcctaacacatgcaagtcgagcggtaacaggaaagtgcctgcacttttgctgacgagcggcggacgggtgagtaatgtctggggatctgcccgagggcgggggataaccactggaaacggtggctaataccgcataatgtcgcgagaccaaagtgggggacctgaaagggcctcacgccgtcggatgaacccagatgggattagctggtaggtagggtaatggcctacctaggcgacgatctctagctggtctgagaggatgaccagccacactgggactgagacacggcccagactcctacgggaggcagcagtggggaatattgcacaatgggcgcaagcctgatgcagccatgccgcgtgtatgaagaaggccttcgggttgtaaagtactttcagcggggaggaagggtttagcctgaagagggctggactttgacgttacccgcagaagaagcaccggctaactccgtgccagcagccgcggtaatacggagggtgcaagcgttaatcggaatgactgggcgtaaagcgcacgcaggcggtcaattaagttagatgtgaaatccccgggctcaacctgggaatggcatctaagactggttgactggagtctcgtagaggggggtagaattccatgtgtagcggtgaaatgcgtagagatgtggaggaataccggtggcgaaggcggccccctggacgaagactgacgctcaggtgcgaaagcgtggggagcaaacaggattagataccctggtagtccacgctgtaaacgatgtcgatttggaggttgcggtcttgaacggtggcttccgaagctaacgcgttaaatcgaccgcctggggagtacggccgcaaggttaaaactcaaatgaattgacgggggcccgcacaagcggtggagcatgtggtttaattcgatgcaacgcgaagaaccttacctactcttgacatcctcagaatttgctggagacagcgaagtgccttagggaactgagagacaggtgctgcatggctgtcgtcagctcgtgttgtgaaatgttgggttaagtcccgcaacgagcgcaacccttatcctttgttgccagcacgtgaaggtgggaactcaaaggagactgccggtgataaaccggaggaaggtggggatgacgtcaagtcatcatggcccttacgagtagggctacacacgtgctacaatggcggatacaaagtgaagcgacctcgcgagagcaagcggaacacacaaagtctgtcgtagtccggattggagtctgcaactcgactccatgaagtcggaatcgctagtaatcgtagatcagcatgctacggtgaatacgttcccgggccttgtacacaccgcccgtcacaccatgggagtgggttgcaaaagaagtcggtagcttaaccgaaaggggggcgctgaccactttgtggctcatgactggggtgaagtcgtaacaaggtaaccgtaggggaacctgcggttggatcacctccttacctgagagaggttgagtgcagtgctcacacagattgtctgatgaaaatagagtgcaaatgagtctgcgaagctgaccagcgggtccccttcgtctagaggcctaggacaccgccctttcacggcggtaacaggggttcgaatcccctaggggacgccatattgcgggatgacgggtgaaaggcgttgtcaggttatctttaagcggatttaggtgaatctgtttagcgatagatgctctttaacaatctggaacaagctgaaaaattgaaatactcaataatatcgccgaggtattgttgaggtgtctctcaagctgaacagtccgagacagtttcgggttgtgaggttaagcgactaagcgtacacggtggatgcctaggcagtcagaggcgatgaaggacgtgctaatctgcgaaaagcgtcggtgagctgatatgaagcgacagagccggcgatgtccgaatggggaaacccagtgcaatgcgttgcactatcattaactgaattcataggttaatgaggcgaaccgggggaactgaaacatctcagtaccccgaggaaaagaaatcaaccgagattcccccagtagcggcgagcgaacggggaggagcccagaacctgcatcagcgatagcatcagaggaacggtctggaaaggccggcgagagagggtgacagccccgtactcgaagatggtatggctgtgagttcgatgagtaaggcgggacacgagaaatcctgtctgaaggtggggggaccatcctccaaggctaaatactcctgactgaccgatagtgaaccagtaccgtgagggaaaggcgaaaagaaccccggcgaggggagtgaaagagaacctgaaaccgtgtacgtacaagcagtgggagccgtgattaatcagggtgactgcgtaccttttgtataatgggtcagcgacttatattctgtagcaaggttaaccggataggggagccgcagggaaaccgagtcttaactgggcgaaagagttgcagggtatagacccgaaacccggtgagctagccatgggcaggttgaaggttgggtaacactaactggaggaccgaaccgactaatgttgaaaaattagcggatgacctgtggctgggggtgaaaggccaatcaaaccgggagatagctggttctccccgaaagctatttaggtagcgcctcgtgaattcatcttcgggggtagagcactgtttcggctagggggccatcccggcttaccaacccgatgcaaactgcgaataccgaagaatggtatcacgggagacacacggcgggtgctaacgtccgtcgtgaagagggaaacaacccagaccgccagctaaggtcccgaagtcatggttaagtgggaaacgatgtgggaaggcccagacagccaggatgttggcttagaagcagccatcattgaaagaaagcgtaatagctcactggtcgagtcggcctgcgcggaagatgtaacggggctaaaccatgcaccgaagctgcggcagtgacacgcaagtgttattgggtaggggagcgttctgtaagccggagaaggtggagctgtgaggcctgctggaggtatcagaagtgcgaatgctgacataagtaacgataaagcgggtgaaaaacccgctcgccggaagaccaagggttcctgtccaacgttaatcggggcagggtgagtcgacccctaaggtgaggccgagaggcgtagctgatgggaaacaggttaatattcctgtactgaatgtgactgcgaaggggggacggagaaggctaggccatccgggcgacggttgtcccggtttaagcgtgtaggtgggaggagcaggtaaatccgctcttctgtgaacactgaggcgtgatgacgagccgttacggcggtgaagtggttgatgcccggcttccaggaaaagcctctaagcctcaggtcatattgaatcgtaccccaaaccgacacaggtggtcaggtagagaatactcaggcgcttgagagaactcgggtgaaggaactaggcaaaatggtgccgtaacttcgggagaaggcacgctggcggtaggtgaaggggtttgcctccggagctgaagccagtcgcagagaccagctggctgcaactgtttattaaaaacacagcactgtgcaaacacgtaagtggacgtatacggtgtgacgcctgcccggtgctggaaggttaattgatggggttagccgcaaggcgaggctcttgacagaagccccagtaaacggcggccgtaactataacggtcctaaggtagcgaaattccttgtcgggtaagttccgacctgcacgaatggcgtaatgatggccaggctgtctccacccgagactcagtgaaattgaactcgctgtgaagatgcagtgtccccgcggcaagacggaaagaccccgtgaacctttactatagcttgacactgaacatggagccttgatgtgtaggataggtgggaggctgagaagtgcggacgccagtctgcatggagccatccttgaaataccacccttgaatgttcgatgttctcacctgggcccgtaaaccgggccggggacagtgtctggcgggtagtttgactggggcggtctcctcccaaagggtaacggaggagcacgaaggttggctaatcacggtcggacatcgtgaggttagtgcaaaggcataagccagcttaactgcgagagtgacggttcgagcaggtacgaaagtaggtcttagtgatccggtggttctgaatggaagggccatcgctcaacggataaaaggtactccggggataacaggctgataccgcccaagagttcatatcgacggcggtgtttggcacctcgatgtcggctcatcacatcctggggctgaagtaggtcccaagggtatggctgttcgccatttaaagtggtacgcgagctgggtttagaacgtcgtgagacagttcggtccctatctgccgtgggcgcaggaagattgaaaggggctgctcctagtacgagaggaccggagtggacgcaccgctggtgtacgggttgtcatgccaatggcatagcccggtagctaagtgcgggagagataaccgctgaaagcatctaagcgggaaacttgccttgagatgagtcttcccctgactgaggtcacggaaggaacgtttaagacgaagacgtggataggctgggtgtgtaagtgcagcgatgcattgagctgaccagtactaatgaaccgagaggcttaaccttacaacaccgaaggtgttttggtgttcagagggcagccggcagaagccggttgacagcagagagatgacttttcagcttgttcagagattgattcgggtggttgtggcagaagagcgacaacggccggaagaaaaccgaatatgcctggcggcgatagcgcggtggtcccacctgaccccatgccgaactcagcagtgaaacgccgtagcgccgatggtagtgtggggtctccccatgtgagagtaggacactgccaggctttaattttttgcgccaacagtgagtttgggcaactattgctgatatggctcagttggtagagcacacccttggtaagggtgaggtccccagttcgaatctgggtatcagcaccatgataacgaataaagaatttgtctggcggcgatagcgcggtggtcccacctgaccccatgccgaactcagcagtgaaacgccgtagcgccgatggtagtgtggggtctccccatgtgagagtagggaactgccagactttattttgaaacaaaaaggccacccttctgggtggcctttttgcatttaacaaagaactaacttagttttccaactgttttccacgcctatagctgataaactacttattaaatagctttattgagtgttgagtgaatgctttctcttaaagagtttaatacctttgggttatcagcctatgctaaacgtttagatatagctgaatctgccgagtccttattagctttatggcaaaaagccaaaagcgaaaaacaacctgtattactgcttggtggaggtagtaatgtcttatttactacaaattttgaaggaactgtgattctgaatagaattatggggattcaacagcgggagacagatgaatcatggcatttacatgtaggggcgggagaaaattggcacgaattagtctgtcattctcttaaaaatcaaatctatggattagagaatctggctttaattcctggttgctctggcgcagcaccaattcaaaatattggtgcatatggtattgaatttagagatgtgtgtgaatatgtagatgttcttaatctagaaactggggaacaaacgcgtcttagtgttggtgaatgtcagtttagatatcgtgatagtattttcaagcataaatataaagcaaatcattctattatttctgtaggattattgttgaagaagaattggcagccaatattgaactacggtaatttaactaggctatcgaaagataatgtaactcctcagcagatttttgattcagtatgtgcaatgcgcaccagtaaattacctgatcctgcaataacaggaaacgcgggcagtttcttcaaaaacccaattgtcagtgcggaagttgcggcaaaaatcaaagaaaattaccctgatagcccccaatattcttacacgaatgggatgtttaaattagcggcagcttggctcattgaacgttgtaatttaaaaggttatcgcattggaggtgcatctgtgcatcttagacaagctctagtactgataaatcaggaaaatgctacaggtaaggatgtagttttattggctgcttacattcgccggcaagtgataagtaagtttggtgtattacttgaacctgaggttcgttttattggttctaaaggcgaaattgatgctgtggaatgtatttcatgaaagatataaccgtgccattacagttgattaagattttgtctgacggtgaagttcattccggtcaacagttgggacaatatttagggatgagtagggctggaattaataaacatatacagacaattcgtgagtggggaattgagctagaaacaactcttggtaaggggtatagccttatggcacctatgcagttacttgatgagtctactattttgcaatacttacctcaggatcgtataactgttttgccagttattgattcgactaatcagtatttgttggaacgtttatctgaattgaaatcaggggatgcttgtgttgcagagtaccagtatgctggcagagggcggcgtggaaggaaatgggtttcgccctttggtaaaaatctttatttatctatgtattggcgccttgaacaaggacctgctgctgcaattggattgagtttggttgttggcattgttattgctgaagtattgcatcgatttggcgctggtagaattagggtaaaatggccaaatgatttatatcttgatgataagaaattagcgggaattttagttgaactaataggaaagactggtgatgctgctcaggttgtaataggtgcgggtataaatatttcgatggatcataaggacgaagaacctattaatcagcaatggattaatttgttgcaggcaggaattcaagttgatcgtaataaattggctgtagaaataatacttgatctaaggaaagctctaattcagtttgaaaataaaggcttgtcttcatttgtttctcggtggtttgagttagataattttatggataggccggtgaaattaattattggtagtcaggaagtgtatggtatagctaggggtattaatcagcaaggtgctttgttacttgatcagaatggtgtcataaccccatatattggcggggagatttctttaagaggttgttaaaaatgaccggaagagaaatgtcttccgggttcggagactatctttacttacgtagccttacgctttcaatagtgtgattagtaccttttgtcatgattaggcttgcgcgttctcgagttggtaaaatattttgtcgcaaattcagtccattgatctcttgccagatatcggatgcagtatttatggcttcttcttctgatagtttggagtaactgtggaaataagaatctggatcggaaaaggcaccttggcggaattttaagaaacgactgatataccaacttttgagtaatttttctggtgcatcgacgtagatagaaaagtcgacaaaatcagagacaaatacatggtgtggatcatggggataatccataccgctttgtaatacattcaaaccctctagaatcaaaatgtctggttgtttaatgaatttttgctcatttggtacgatatcataggtaagatgagagtatactggtgcggatacttgtttagagcccgatttaatatcagatacaaatttcactaagctatgcatatcatatgactgtgggaaccctttctttttcatcagtccacgttcattcagcacgctgttagaatgtagaaaaccatctgtagtaattaattctacgcttctgtgttcaggccaacgactcagcagagcttgtaatagacgtgcagtagtgcttttaccaacagcaacactgccagcaattcctatgacataagggactttttgtccatcagtacctaaaaattgttccagcactgcttgacgacgtaaatttgaactaatataaaaattgagtaagcgagataaaggaaggtaaatctcaacaacttcttctaaagaaatttcttcattaattccttttaaatcaattaattcttcttttgttaatgtcagtggaactgaatcacgtaaggttgcccattgttcacgattgaattgcaaatatggagtagccaaaaaaggttcttttttattcataaaccaacatctgcctgtttgtgcaggtttggcaagttgtaataaacaacctgtacccgacaaaaaataaatcgcatgatatcgactgatgagcggcaggcgtaggcttttttatatttttagaggttttttttgtaagaaatgcagaattgtaaaaaattgagttgttttacttaatgttagcttcagctgtttgcttatcatgatgggaatttaaatgattcaagatgaagtggcttatcaagttttatcgagcacttgtgataggttccttagttggtaggtaattcggtgtttattgtttaagctaaatcaattgaaaaaaacagctaatcgaatgaaattggttattttgcaaccgaatgatcaaggaaagcaatttttttgttgcatagagcgttcacactgcctagaatgcgcagcacttgatgccggcatagctcagttggtagagcaactgacttgtaatcagtaggtcccgagttcgattcttggtgccggcaccattaaaaatttggaaaggtggggttcccgagcggccaaagggagcagactgtaaatctgccgtcacagacttcgaaggttcgaatccttcccccaccaccaaagaatcagatttaatcttggtattcttttagtgcttaactggaagcaaagtatattgagatcaacatacagctgattaaagtcaggtagccgagttcaatgcgggcatcgtataatggctattacctcagccttccaagctgatgatgcgggttcgattcccgctgcccgctccaagatgtgctgatatagctcagttggtagagcacacccttggtaagggtgaggccggcagttcgaatctgcctatcagcaccacttccttaatgtccttgtctcccgattttattcctgtaagcgatattcaacgagcaattgcttggttgatgtggtggaaccaccgattccgtgtcttagagggacaatctaatgtctaaagaaaagtttgaacgtacaaaaccgcacgttaacgttggtactatcggccacgttgaccacggtaaaactaccctgactgctgctattactactgtactggctaaaacctacggtggtaatgctcgtgcattcgaccaaatcgataacgcaccagaagaaaaagcgcgtggtatcaccatctctacttctcacgtagaatacgatactccaagccgccactatgcgcacgttgactgcccaggccacgccgactacgtgaaaaacatgatcaccggtgcggctcagatggacggcgcaatcctggtagttgccgcgactgacggtccaatgccacagacgcgtgagcacatcctgttaggccgtcaggtaggcgttccttacatcatcgtgttcctgaacaaatgtgacatggtagacgacgaagagctgctggaactggttgagatggaagtgcgtgagctgctgtctcagtacgatttcccaggcgacgacacgccagtcatccgtggttctgctctgaaagcgctggaaggtgatgcagagtgggaagccaaaatcatcgaactggcagaggccctggatagctacattccagagccagagcgtgctattgaccagccattcctgctgccaatcgaagacgtattctctatttcaggccgtggtactgtagttaccggtcgtgtagagcgcggtatcgttaaagtgggtgaagaagttgaaatcgtgggtatcaaagacacgactaaaaccacttgtactggcgtagaaatgttccgcaaactgctggacgaaggccgtgcaggtgagaacgtcggtgttctgctgcgtggtaccaagcgtgacgaaatcgaacgtggtcaggtactggcgaaaccgggttcaatcaagccacacaccactttcgaatcagaagtttatattctgagcaaagacgaaggtggccgtcatacgccattcttcaaaggctaccgtccacagttctacttccgtacaactgacgtgaccggtaccattgaactgccagaaggcgtggaaatggtgatgccaggtgataacattcagatgaaagttaccctgattgccccaatcgcaatggaccagggtctgcgcttcgctatccgtgaaggtggccgtacagtaggtgctggtgttgttgctaaagttatcgcttaatagctaatgattaagtacctaactctagaataggtttgccttctggcttgttttagaacagatgcctggtgtgctacatcaggtgtctgttagtgagtattttaattgatatcatccttccttaaattctctgcatgaaccacaccgttgggttatctcttcgtgttttaactttttgattttggccgcttgttcctgaaggcgttatttggttgttttattaggatattctcagagttatatacatcattcatctatagaatacgttggtgataactcgcgatttttccaaataagtatttgttttcagacttagataagtcatattttcttttacatacaggtagtaatatctaacccatgcttgttctgtctctgttggtatgctctaacagaaagagaggatactcccgaaaagattacggcatagcatgctcgttttcgtgcaactaagtatgtgaattctatatcccgtaatatcttaagtaggttgttctgtctagctatcagttctggaacaaattgttgatgtaggagatagtcttaggatggaataagtttaagaaagtccctgatagagataaaagccttcctagccaaagtgttatagaaatgagagaactccctctatttgacaaggctaaaagaatatttggaggaacctgaatcagaaaattaaaatgcgaatgattattgaaatgagactcattattatttaatatgcgctataatgtgtaccagagagtgttatttatgtatgtctgcctatgtaatgcggtgagtgacaaaacaatacgtaatgcggtgcgtcaacatcatattcactctattaaagaactaaaatgtattgtgcctgtaggccgtgattgtggcaaatgcatacgccaagctagagagctaattaatgaggagattgcacagttacccaagatagataacgttgcttgataaaaaagaagtaagtttactactactctgctgaataggtactacactttaagtactggaagcggaggaatagtctatgaaaggtgataaaaaaatgattgctcatttgaacaaacttcttggaaatgagcttgttgcaattaatcagtattttctgcacgcccgaatgttcaaaaactggggtcttactcgccttaatgataaggaatatcatgaatctatcgatgaaatgaagcacgccgataggtacattgaacgtatcctttttcttgaagggattcctaatttgcaggatctaggaaaacttaacatcggagaagatatcgaagaaatgctcaaatctgacttgcagctcgaattgcaaggagctaaagatttgaaagaagcgattgcttatgctgattcgattcatgactatgttagccgtgatttaatgattgatattctagatgaagaagaaaagcatattgattggttggaaactcaatttgaattaattgaacgtatggggattcaaaattacactcaatcacagattcttgaaggagaatagttatagttacggaaaaatgccctatctgttaagttagggcatcttgttttatgcccctctaattttactctggacagatcttcatctgtgtcttgctttgttaattgatttgcgtataatatgcggtcttacttacgtgtaagtctggtttgttagccagtaagtgagcagtatttgtttgctgcccatttaaaatatccccgatatgggggttatatattgaacgattgcactctcccatcaatcgaaatgggattgaggagtaatcatttatgtttataaaatagttggagctctggtctcatgcagaaccaaagaatccgtattcgcctgaaagcatttgatcatcgtttgatcgatcaatcaactgcggaaattgtcgagaccgctaagcgtactggtgcgcaggttcgtggtccgatcccgctgccgactcgtaaagagcgttttaccgttctaatttctccgcatgttaataaagatgcgcgtgatcagtacgaaattcgcactcataagcgtctggttgacatcgttgagccaaccgagaaaaccgttgatgctctgatgcgtctggatctggctgccggtgtagacgtgcagatcagcctgggttaatcaggtcattgaacgattgagaggttgaaacaatgattggtttagtcggtaaaaaagtgggtatgactcgtatcttcactgaagatggcgtttcgatccctgtaactgttatcgaaattgaagataaccgtgttactcaggttaaagagctagataacgatggttatcgtgcaattcaggttactactggtagcaaaaaagctagccgtgtaaataaacctgaagcgggtcatttcgctaaagctggcgttgaagctggccgtatcctgcgtgaattccgcctgtctgaaggcgaagaatatgctgtaggtcaaagcattagcgttgagattttcgctgacgttaagaaagtcgacgttactggtacatctaaaggtaaaggttttgctggtactgttaagcgctggaacttccgtacccaagatgctagccacggtaactctttgtctcatcgtgttccgggttctatcggtcagaaccaaactccgggcaaggtatttaaaggcaagaaaatggcaggccaactgggtaatgaacgcgtaactgttcaaagcctggatgtagtacgtgttgacgctgagcgcaacctgctgctggtcaaaggtgctgttccaggctcaactggtggcaacctgatcgtaaaaccggctgtcaaggcgtaacgtcgaggagataggaatggaattggtaatgaaagacgcgcaaggcgcgctgactgtttccgaaactaccttcgggcgtgatttcaatgaagcgcttgtgcatcaagtagttgttgcttacgcagctggtgcacgtcaaggtactcgtgctcagaaaacccgtgctgaagtttctggttcaggtaaaaaaccatggcgtcagaaaggcactggccgtgcacgttctggttctattaagagcccaatttggcgctctggtggcgtaacttttgcagctaagccacaggaccacagtcaaaaagttaataagaaaatgtaccgtggtgctttaaaaagcatcctgtctgaattggtacgtcaagatcgtttgatcgttgtcgagaagttttctgtagaagcgcctaaaaccaagcttctggttcagaaactgaaagagatggctctggaagatgtgctgattatcactaatgaagttgatgagaatttgttcttagcagctcgcaacctgtacaaggttgatgttcgtgatgtagctggtattgatccagttagcttgatcgccttcgataaagtggttatgactgctgatgctgtgaagcaagttgaggagatgctggcatgatccgtgaagaacgtctgctgaaagtactgcgcgcaccgcacgtatctgaaaaagcttctacagcgatggagaaaagcaacgccatcgttctcaaagttgcgaaagacgcgactaaagcagaaatcaaagctgctgtgcagaaactgtttgaagtcgaagttgaaggtgttaacactttgctggtaaaaggcaaaactaaacgccacggtcagcgtattggtcgtcgtagcgactggaaaaaagcttacgtcacactgaaggaaggccagaatatggacttcatcggtggtgcagagtaagtcggaggagtaaagaacaatggcaattgttaaatgtaaacctacgtctccgggccgtcgccacgttgttaaagtggttaaccctgagctgcataagggtaaaccttatgctccattgctggaaaaaagcagcaaaaccggtggtcgtaacaacaatggccgtattaccactcgtcacattggtggtggccacaagcagcactatcgtttgattgactttaaacgtaataaagatggtatccctgctgtagttgagcgtttggaatatgatccaaatcgttcagcaaatatcgccttggttttgtataaagatggtgaacgtcgttatatccttgcacctaaagggctgaaagctggtgatcagatccaatctggtgttgacgcatctatcaaaactggtaacgcattgccaatgcgcaatatccctgttggttctaccgtacataacgtagaaatgaaaccggggaagggtggtcagttggctcgttccgctggtgcatacgttcagatcgttgcccgtgatggttcttatgtaactttgcgtctgcgttctggtgaaatgcgtaaagttctgtctgactgccgcgccactttaggtgaggttggtaatgcagaacacatgctacgtgttctgggtaaagctggtgcaagtcgctggcgtggcattcgtcctaccgttcgtggtacggcgatgaacccggtagatcacccacatggtggtggtgaaggtcgtaactttggtaaacatcctgtaactccttggggtgttcaaactaaaggtaagaagacccgtagtaataaacgtactgatcagttcatcgtacgtcgccgtactaaaaaataattagaggataaaccatgccacgttctctcaagaaaggtccatttattgacctgcacttgctgaagaaggtagagaaagcggtggaaagcggagacaaaaagcctattaagacttggtcccgtcgttcaacgatctttcctaacatgatcggtttgaccatcgctgtccataatggtcgtcagcatgtaccagtttttgtttccgacgaaatggttggtcataaactaggtgaattcgcgccgacccgtacttatcgcggccatgcggccgataaaaaggctaaaaagcgctaaggtaggaggaagagatggaaactatcgctaaacatcgccacgctcgttcttctgctcagaaggttcgccttgtagctgacctgattcgcggtaagaaagtgtcgcaagctctggaaactctgacctataccaataagaaagctgctggtttagtgaagaaagtacttgagtctgctattgctaatgcagaacacaacgatggtgctgacattgatgatctgaaggtcacgaagattttcgtagacgaaggcccgaccatgaagcgtattatgcctcgtgcaaaaggtcgtgcagatcgcatcctgaagcgcagcagccacattactgtggttgtgtccgatcgctgagactctggagactagcaatgggtcagaaagtacatcctaatggtattcgcctgggtattgtcaaaccttggaactctacttggtatgcgaatactaaagaattcgctgacaacctagacagcgattttaaagttcgccagtacttgaagaaagaactggcaaaagcgtctatttcacgcattgttattgaacgtcctgctaaaagtattcgtgtaactattcacactgctcgcccaggtatcgtaatcggtaagaaaggtgaagacgtagaaaaactgcgtaaaactgtagcggaaatcgctggtgttcctgcgcaaattaatatctctgaagtacgtaagcctgaactggacgcgaaactggttgctgacagtattacttcacagttggaacgtcgtattatgttccgtcgtgctatgaagcgtgcagtccagaatgcgatgcgtcaaggcgctaaaggcattaaagtggaagttagtggccgtttaggcggtgctgaaatcgcgcgtcctgaatggtatcgtgaaggtcgtgtaccgttgcacacactgcgtgcagatatcgactacaacacttcagaagcgcacaccacttatggtgtactcggcgttaaggtatggatcttcaaaggtgagatcttgggtggtatggctgctgttgaacaggcggaaaaaccggctgcacaacctaaaaagcagcagcgcaaaggccgcaagtaaggagagtcgctgatgttacaaccaaagcgtacgaaattccgtaaaatgcacaaaggccgtaaccgtggcctggcagcaggtgcggatgttagcttcggcactttcggtctgaaagctgtgggccgtggccgtctgacggcacgtcagattgaagcggcacgtcgtgctatgacccgtgcaattaaacgtcaaggtaaaatctggatacgtgtattcccagacaaacctataactgaaaagccactcgaagtgcgtatgggtaaaggtaaaggtaacgtagaatattgggttgccttgatccagcctggtaaagtcctttatgaaatggacggtgtgcctgaagagctggctcgtgaagcattcaagctggcagcagcgaaactgcctatcaagaccacctttgtaactaagacggtgatgtaatgaaagcacaagagctgcgcgaaaaaagcgttgaagagctgaaaactgagctgctgaatttgctgcgtgaacaatttaacctgcgcatgcaggctgcaagtggccagctacaacagtctcatctgttgaaacaagtgcgtcataatatcgcacgcgttaagactttattgactgagaaggcgggtgcgtaatgaccgataaaattcgtactttgcaaggtcgtgttgtaagtgacaaaatggagaaatctattgttgttgctattgagcgtaaggtgaaacaccctctgtatggtaaattcatcaaacgtacgactaaactgcatgtacatgacgagaacaatgaatgtggcattggtgatgtggtggaaatccgcgaaacccgtccactgtccaaaactaaatcttggactttagttcgcgttgtagagaaagcgattctgtaagctggctcgaatagagtaaacggctcaggctatgggccgtttattttttctatctatatctgagatgtggtgttataatgccgcgccctcatgatatggggtatctgaacggcctcttcatattaaattatagtagtgaagtgggctcagtagtagttgacatttagcggagcactaaaatgatccaagaacagactatgctgaacgtggccgacaactccggtgcacgtcgcgtaatgtgtatcaaggttctgggtggctcgcaccgtcgctatgcacacgtcggcgacatcataaaagtcaccatcaaggaagcaattcctcgtggtaaagtgaaaaaaggtgatgtcctgaaagcggtagtggtgcgcaccaggaagggtgttcgtcgccctgacggttctgtcattcgcttcgatggcaatgcttgcgtgttgttaaacaacacaagtgagcaagttatcggtacgcgtatttttgggccggtaactcgtgaacttcgtaatgaaaagttcatgaaaattatctccctggcaccagaagtactctaaggagcggacaatggcagcgaaaatccgtcgtgatgacgaagttatcgtgttgactggaaaagataaaggtaagcgcggtaaagtaaaacaggttctttctactgggaaagtcattgttgaaggtatcaacttggttaaaaagcatcagaagcctgttccggctctgaaccagccaggtggcatcgttgaaaaagaagctgcaattcaggtttcaaacgttgcgatcttcaatgcggcaaccggtaaggctgaccgtgtaggttttagatttgaagacggaaaaaaaattcgtttctttaaatctaacagcgaaactatcaagtaatttggagtaatacgatggcgaaactgcatgattactacaaagacgaggtagtccaaaaactgatgactcagtttggctacaattctgtcatgcaagtccctcgggtcgagaagatcaccctgaacatgggtgttggtgaagcaattgctgataagaaactgctggataatgcagcagcggatctggcagcaatctctggtcaaaaaccattgatcaccaaagcgcgcaaatcagttgcaggcttcaaaatccgtcagggctatccaatcggctgtaaagtgaccctgcgtggtgaacgtatgtgggagtttcttgagcgcctgatttctattgctgtacctcgtattcgtgacttccgtggtttgtctgctaagtcatttgatggtcgtggcaattacagcatgggtgtacgtgagcaaatcatcttccctgaaatcgattacgataaagtggatcgtgttcgtggtctggatattactatcaccacaactgcgaaatctgatgatgaaggccgcgcactgttggctgcttttaacttcccgttccgcaagtaaggcagggtattcatggctaagcaatcaatgaaagcacgtgatgtaaaacgtgcgaaattagctgaaaaattcttcactaaacgtgtagaattgaaagctgtcatttctgatgtgaatgcatctgatgaagagcgttggaatgctgttcttaagctgcaaacactgccacgtgattccagcccctctcgtcagcgtaaccgctgccgccaaactggtcgtccgcatgcgtttttgcggaagtttgggttgagccgtattaaagtccgtgaagccgccatgcgcggtgaaattccgggccttaaaaaggctagctggtaattgtcaccaattgaatcacgggagtaaagacagatgagcatgcaagatcccatcgcggatatgctgacccgtatccgtaacggtcaggccgcgaataaagttgcggtcaccatgccttcctccaagctgaaagtggcaattgccaaggtgctgaaggaagaaggttatattgaagattataaaattgaaggcgacaccaagccagagctggaattagtactgaaatacttccagggcaaggctgttgtagaaagtattcagcgtgtaagtcgaccaagtctgcgcatctataagaaaaaagatgagctgccacaagttatggctggtttgggtatcgctgttgtttctacctctaaaggtgtaatgactgatcgtgcagctcgccaagctggtcttggtggcgagattctctgctacgtagcttaattcgggaggaaagaatgtctcgtgttgcaaaagcacccgtcgttattcctaccgacgtagaggtaaaactcgacggtcaggttatttcgattaagggtaaaaacggcgagttgagtcgtacaatccacagcgcagttgaagttaagcatgcagataatcaactgaccttcgctccacgcgatggttatgttgatggttgggcacaggcgggtacaactcgttctttgatgaatgctatggttatcggtgttaccgaaggcttcactaagaaacttcaactggtaggtgttggttatcgtgcagcagtcaaaggcaatgttatcaacatgtctctgggcttctcacatccagttgaccacgaactaccagcaggcattactgcagaatgtccgtcacaaactgaaatcgtactaaagggtgctgataaacaggtaatcggtcaggttgcggcagaactgcgtgcctatcgtcgtcctgagccttataaaggtaagggtgttcgttacgccgacgaagtcgtgcgtatcaaagaggctaagaagaagtaaggtaacactatggataagaaagcagctcgtatccgtcgtgcgacccgcgcacgccgcaagctccaggaactgggtgcaactcgcctggtggtacatcgtacccctcgccatatttatgcgcaggttatcgcaccaaacggttctgaaactttggtggcagcttctactacagaaaaagctatcaatgaacaactgaaatacactggaaataaagaagcagcagcagcagttggcaaggcaattgctgaacgtgcattggaaaaaggtattaaagatgtatcctttgaccgctctggtttccaatatcatggtcgagtccaggcactggcagatgctgcccgtgaagctggccttcagttctaaggtagaggtgtaagatggctcacatcgaaaaacaagctggcgaactgcaggaaaagctgattgcggtaaatcgcgtatctaaaaccgtaaaaggtggccggattttcagctttaccgcactaactgttgtaggtgatggtaatggtcgcgttggttttggctacggcaaagcacgcgaagttccggcagcaatccagaaagcgatggaaaaagcccgtcgcaatatgaaaaccgtcgcactgaacagcggcactttgtatcacccagtaaaaggtgcacacactggttcccgtgtgttcatgcagcctgctcacgaaggtactggtatcatcgcaggcggtgctatgcgtgctgttttggaggtggctggtgttcgtaacgtactggctaaaacctatggttccactaaccctattaatgtggttcgtgcaactctggatgctttagacagcatgaagtctccagaaatggtcgcagctaagcgtggtaaatccgtcgaagaaattctggggtaatggccatggctaagactattaaagtaacacagattcgcagttcaatcggccgtctgcctaaacataaggcaactttggttggtttaggtctgcgccgtatcggtcatacagtagagcgtgaagatactcctgctatacgtggtatgatcaacttggtttcctatatggttaaagttgaggagtaacagatgcgcttaaatactctgtctccggctgatggttccaagcatgcgcctaaacgtgtaggtcgtggtattggttctggcctgggtaaaaccggtggccgtggtcacaagggtcagaaatctcgttctggcggtggcgtccgtcgcggttttgaaggtggtcagatgcctttgtaccgtcgtttgccaaaatttggctttacttcacgtaaggcgatggttacagcagaagttcgtttgtctgattttgctgccgttgaaggcgatattatcgatctgaatgcattgaaagcagctaacattgttggcactcaaattgaatttgcgaaagttattctttctggcgaaatcaatcgtgcagtaactgtgcgtggccttcgtgttactaagggcgctcatgctgcaattgaagctgctggcggtaaaattgaggaataagtaacagatggctaaacaaccaggattagatttccaaagtgctaaaggtggactgggcgagctgaaacgtaggctgttgtttgttattggcgcgttaattgttttccgtattggttcttttattcctatccctggtattgatgccactgtgcttgccaaattgctcgaacagcaaaggggcaccatcattgaaatgtttaacatgttctctggtggtgctttaagtcgtgcttctatctttgcactggggataatgccgtatatttctgcgtctattattattcagttgttgacggtggttcatccaacgttggcagagattaagaaggaaggggaagctggtcgtcgtaagattagccagtatactcgctatggtactttagtgctggctatattccagtcaatcggtattgctactggtttgccgaatatgccaggaatgcaagggctggtgatcaatccagggtttgctttctacttcacggctgttgtgagcctagttactgggactatgttcctaatgtggttgggtgagcagattactgagcgtggtattggaaacggtatctctatcataatctttgctggtatcgttgcgggtttgccgccggccattggccataccattgagcaagctcggcaaggcgatctgcacttcctcctgttgctgttggttgcagtgttagtgtttgcagtgactttcttcgttgttttcatggagcgtggccaacgacgtatcgttgttaactatgcaaaacgtcagcaaggtcgccgagtttatgctgcacagagtacacatttaccgttgaaagtgaatatggctggggttatccctgctatttttgcttccagcattattctgttccctggtaccatagcttcctggtttgggggaggaactggttggaactggctgactactatttcaatgtacttgcagcctgggcaaccgctttatgtgttactctacgcgtctgcaatcatcttcttctgttttttctataccgcgttggttttcaacccgagagaaacagcagataacctgaagaagtccggtgcatttgtaccaggaattcgtccgggagagcaaacagccaagtacattgataaggtaatgacacgcctaactttagttggtgcgatgtatattacttttatctgcttaatcccggagttcatgcgtgacgcgatgaaggtgccattttattttggcggtacttcgctacttattgtagttgtagtcatcatggactttatggctcaagtgcaaactctgatgatgtcaagtcagtatgagtccgcattgaagaaggcaaatcttaaaggttataaccgttaattggtttgcttgagaagttacggagagtaaaaatgaaagttcgtgcttccgtcaagaaattatgtcgcaactgtaaaatcgttaagcgtaacggtatcgttcgcgtgatttgtagtgcagagcctaagcataaacaacgccaaggctaataaaatagcatatttttcttgcaaagtcggtttgagctggctaaattagccagccaatcttttttatatcacagtaacactgtttgagtatcctgaaaacgggcttttcagaatggtgttgcggtaaataaataatttaggagtgcatagtggcccgtatagcaggcattaacattcctgatcagaagcataccgtgatcgctttaacatcgatctacggaattggcaaaactcgctcccaagccatttgtgctgcggcgggtattgctgagcatgttaagatcagcgagctgtctgaagagcaaattgataagctgcgtgacgaagttgccaaatacgttgtagaaggcgatttgcgtcgtgaagtaaccctgagcatcaaacgtctgatggatcttggtacttatcgtggtttacgtcaccgtcgtggtctacctgttcgcggccagcgtactaagaccaacgcacgtacccgtaagggtccacgtaagccgatcaagaaataatcggggtattgtataatggcaaaagcacctattcgtgcacgtaagcgtgtaagaaagcaagtctctgacggtgtggctcatatccatgcttctttcaacaacaccatcgtgaccattactgaccgccagggtaacgccttgggttgggcaactgctggtggttccggtttccgtggttctcgtaaatctactccgtttgcagctcaggttgcagcagagcgctgtgccgaagcagtgaaagaatacggaattaagaacctggaagttatggttaaaggacctggtcctggccgcgagtcaactattcgagcgttaaatgcggcaggtttccgcattactaacattactgatgtgactccgatccctcataacggttgtcgtccacctaaaaaacgtcgcgtttaatagcgtttacttttttaggttcgattggagaaagaaaatggcaagatatttgggtcctaagctcaagctgagccgtcgcgagggtacagatctattcctgaagtctggcgttcgcgcgattgacaccaagtgtaaattagaacaagcacctgggcagcatggcgcacgtaaaccgcgtctgtctgactacggtgtgcagttacgtgagaaacaaaaagttcgtcgtatttacggtgttctagaacgtcaattccgtaactattataaagaagcaactcgtctgaaaggcaacacaggtgaaaacctgctgagtttgctggaaggtcgtctggacaacgttgtttaccgtatgggtttcggggcgactcgtgctgaatcacgccaaatggtaagccataaggctatcatggtgaatggccgcgttgttaacatcgcttcttatcaggtatccccgaatgacgtagtcagcgttcgcgaaaaatcgaaaaagcagtctcgtatcaaggcggctttagagctggctgagcagcgtgagaaaccaacttggttggaggttgatgctgtgaagatggaaggtgtgttcaaacgtattccagaacgtgccgatctgtctgctgacatcaacgaacacctgatcgtcgagctttactctaagtaaagcttagcaccaaagagaggacacaatgcagggttctgtgacagagtttctaaaaccgcgcctggttgatatcgagcaagtcagttcgacgcacgccaaggtgacccttgagccattagagcgtggctttggccatactcttggtaacgcactgcgccgtattctgctttcgtctatgccgggttgtgcggtgactgaggttgagattgatggtgtactgcatgagtacagcaccaaagaaggtgtacaggaagatatcctggagattctcctcaacctgaaagggctggcggtaagagttcagggaaaagatgaagttattcttaccttgaataagtctggcattggccctgtgactgcagccgacattatccacgacggagatgtcgaaatcgtcaagccgcaacatgtaatctgccacctgactgacgaaactgcttctataagcatgcgcattaaagttcagcgtggtcgaggttatgtgccggcttctgcccggattcattcggaagaagatgagcgccctattggtcgtttgttagtagacgcttgttatagcccagtagagcgtattgcctacaatgttgaagcagcgcgtgtagaacaacgtaccgatttggacaagttggttatcgagatggaaactaacggtacaatcgatcctgaagaggcgattcgccgtgcagctactattttggctgaacagctggaagcttttgttgatttacgtgatgtacgtcagccagaagtaaaagaggagaagccagagtttgatccgatcctgctgcgccctgttgacgatctggaattgactgtccgctctgctaactgtcttaaggcagaagctatccactacatcggtgatttggtacagcgtaccgaggttgagttgcttaagacacctaacctgggtaaaaaatctcttacagagatcaaagacgtactggcttcacgtggcttatctctgggcatgcgcttagaaaactggccaccagcaagtattgctgatgaataactagatcacaggttaaggttttactgagaaggataaggtcatgcgccatcgtaagagtggtcgtcaattgaaccgcaacagcagccatcgccaagctatgttccgtaatatggcaggttctttggtccgtcatgaaatcatcaagacgactctgcctaaagcgaaagaactgcgtcgcgtcgttgagccgctgattactcttgccaagatcgacagcgtagctaatcgtcgtctggcattcgcccgtactcgtgacaacgaaatcgtggcaaaactgtttaatgagctgggcccgcgttttgcgagccgcgcaggtggctacactcgtattcttaagtgtggcttccgtgctggtgacaatgctccgatggcatacatcgagcttgttgaccgtgctactgagcctcaaacagaagttgcgactgcggagtaatctgtaggggcatataaaagaaccgggtttatcccggtttttttacgcttgcatatatgaatctctaacttattttttttcatcctgctatgctgatatctcaaacaatgttatctattgtaggagatataaagatgtatcgtattggtcaactggctaaattagcgaatgtaactcctgatactgtgcgtttctatgaaaaacaaggaatgatggaacatcagaaccgtactgaaggagggtatagactttatacagagcaagatctacagcgccttcggtttatacgctatgctaagcaattagggtttacattggaagctattacagaattattgtctattcgtgtagatccagcccatcatacttgtgaagagtcaaagcaaattgtagattctaggttaatggaagtggaggaaaaacttcttgaaatgcgaaaaatgcgtgattcacttaagatgctaagtgatgcttgttgtggcagttctcatataagtatttactgttctattcttgaaactttagaacaaggtgctttgaataagaaataagtaatttttctttattattgaaaactcagagagtacaattactatgctggtagataaattaatatgatagaggtatgtgatgattacatatcaccataagaaaggtgtaataaaggataatgctctagaagctctattacgtgatccgctatttaaacaacgagttgaaaaaaataaaaaaggaaaaggaagttaccagaggaaagaaaaacatagcaaagcaagtagctgggagaccagtggtaaggggtcattagattctttactactggtcttttagtttaataggtctatttcctacttttcagtaatctacgaacttctaataataattttgtttcggtaattgggagtatttgatataacttcaatctccttttactaaatgatctgtttattagttttattgtgtagaaaaatagtgaatgatggtaaggtgttcttttaaaatcatatcgatactgacgtcagcagctaaattggcaaaattatctttcatagtaaattcataaactgatttaaaagtttcatcacacccttttaattaaaacataccaagttgtattagttattgtgttctaattatatgactgatgcataatgatttctttggcttttaaaggaaaaaagggcttggctggaatagtttctctacttcggggacaaatttcttatctgtaataaacataattacatgatctccttgttcgataacactgtaatcactagcaataaggacttcgttaccgcgagctattgcactaattgtagtgcctggtggtaatttaatatcacctacagttcgaccaacaacctttgacgtattttcatccccatgagcaatcgcttcgatagcttcggccactccacgacgtaatgaggaaacgcttacaatatctgctttgcgaacatgacctaacagagcggaaatcgtcgcttgttgtggagagattgcaatatcaatgacaccaccttgtactaaatcgacatatgcactacgttgaatgagaactatggcttttttggcacccatgcgtttggcaagcattgcagacatgatatttgcctcgtcatcgttggttagagcaataaatacatcaacttgttctatatgttcttcagctaataactcttgatcggaggcatccccatagaaaacaatggtgtcatgtaataattcggctagttctatagctctttgctgatttcgttcaattaatttaaccctgtaatctttttctagacgtagtgcgaggcctgctcccacattaccgccacctacaatcataatacgtttgtagggtttttctaaacgttgaagctcactcattacagcacgaatatgttgtgatgcagctacaaagaaaacttcgtcaccggcttcaataattgtagaaccttgaggtcttattggtcgatcctgacggaatattgctgcaactctggtattaatatgcggcatgtgttcacgaagtgaggaaagtgcattccctacaagtgagcctccataataagcttttactgcaacaatacttactcggccttcggcaaagttaacgacttgtaaggcgccaggatattgaattagtttataaatataatctataacaagttgttctggtgaaataagataatcaataggaatatcattgggcagaaaaagtttatctgcttcacgaatatattctgctgcgcgtattcgcgcaactttatttggggtgttaaataaggaataagcaatttgacatgcgatcatgttagtttcgtcagaattagttacagcaactaacatatcagcatcttcagcaccagcttctcttaatactctggggtaagaaccatgaccattgactactctgagatcgaatttatcctgtagttggtgtagacggttgggatcagtatcgactatggtgatatcgttattttcacctaccagattttcagctaatgtaccgccaacttgacctgcaccaagaataattattttcatagtattctctaacttattgcaaacaaataattatctctataaatcgtagagatatattaccgtttagttaatcgagcgtaaaagaaaccatcaccaccatttaactcaggtattatttgttttcctagacaatcatttgtctctgttcccgcgagttttgcatctgagtggcgttttaaaaacgagctgatttgctgacaattttcatctggtagaatagaacaggttgcatatactaacgttccgcttttctttaagtatggccaaattgcatcaagaatttcagattgtaattgaactaattgagcaatatcttcctcgcggcgtaaccacttgatatcaggatggcgacggattactcctgttgctgaacacggtgcatccaaaagaatgcggtcgaattgctggttctctgcccaatgttcagggtggcgtccatcaccggtttttactgtagcgtggcagttaaggcgtttgagattttcttttactcgtttgattctttgctcatcaatatctaccgctactacttgagattctggtgctatttcgaggatatatgttgttttccctcctggtgctgcacaaagatcgagaattttctctccatttatgggttttagtaactcgacacactcttgtgcggataaatcttggacagtgacccaacctttgtcaaatccaggtaatattgttacagggcaaggggaaattatgcggatagcagaaggtgatttgggcgctggttccgcatcaattcctgatttacgaagaagagtgagatattcatcccgactatggtatatacgattaactcgtaaccacatagggggttttttattattagcattaataagttgttgccattgttgtggataggctttttggattcgagttaatagccattctgggtgtaagtggtggctggaattattttgcgtacattccattaactgtagctgttgtctctgaaattggcgaagaacgccattaattaacccttttaattgagaatgcttcagagttacggctccgtttactgtttcagcaagtgcggcatgggctggaatacgagtataggcaagttggtatatcccaaccataagcaggtaatgaagaatacgttgtttaccttttaatggttttaccattagttgacctattatccactctagctgtggtaatacgcgtaacactccgaaagataattcctgtaacaagggtttgtctttatcagttatattttgttgcagtttgggtaagactgtactgagagactgtccttgatccagaacttgattgattgcttttgcggtgatacttcgcagattatatgtgtttttcataattaaaagagctgacaaaagccagcattaagagaaagtttgtgagagagattacagcataaaatagtattcagttgattttattacctggagtaaaccattcacgtttagaattaagtagatttgctgctgacattgcttttttaccggcaggttgtaactgtgtaatgttcagaattccatcagcggtagcaatataaataccttctttgtctgcttttagtacagttcctggctctaccgaagtttgttcttcaatggcttctgctttccaaactttaataggttgtccttccatttcgaaaaagctcatgggccagggattaaatgcgcgaatacaacgttcaaggtgggttgcagatagttcccaatttatgcgggcttcttctttgcttagtttttcagcgtaggtaactaaattttcgttttgagtttcaggttgacttttacctgatgttattaatgataatgttttgagtaacgcatctggcccaatattggccagtttttcgtataaactggcactggtatcctcaggtgtaatagggcatcttgctttatatagcatgtcgccagtatcaagacctatatccatttgcattattgttacgccagtttctgtatcaccagcccaaagtgagcgttgaatgggtgctgcacctcgccaacgtggtagtagggaaccatgtacgtttaggcaacctaattctggaatatttaaaacaactttgggaaggatcaatccataggcaacaacgatgagaacatcaggttgttgttttagaacccattgttggttttcttctgagcgtaaagtagctggctgaaaaacggtgatattacgttcctctgccagtacttttacaggactgggtgttagttttttacctcttcctgccggtttatctggtcgagttagaacgccaaccacctcatgctgagacattaacaaagcctctagatggcgtgctgcaaaatcaggtgttccggcaaaaacaatacgtaaagaatcagacacgtttatttcctgtattaatataatttacttggttcgggctttttgtttatccagtttttctactttctggcgtatacgttggcgtttcagtggagataagtaatccacaaaaagtttaccaattaagtggtccatctcatgctgaatacaaattgcaagtaagtcatcagcttgtaattcaaatggtcgaccattgtaatctagggctttgattttgactttttcggctcgtggcaccagtgctcgttgttcaggaatagacaaacagccctcttcgatcccagtttcaccacttttttccagtaattctgggttgatcagaacgagacgctcattacgtgtttctgatacgtcaataacaacaatacgctgatgaatatcaacttgtgttgctgccaaaccgataccttcttctgcatacatagtttcaaacatatcatcaatgatacgtcgaatctctgcatcaactgtttcaacaggcgttgcaatagtgcgaagccgctcgtctgggtaatgtaatacttgtaatactgacatatatgtttagatctgcatccaaaatgttaatggtgttctatgtctattctagacatttcccgtttagattgacagtatcgattgctaattgagcagtttagttttgtccgtcaatcttagccaggatgacaacatggaagctatggaagtatggttgcgaatgaagatgatttctcatttggcaacagagagagcagcaaatgttgcagaaaaattgttatattccgggagtcgttatctcactgtgttgaaagatagtggattatcgccagaacaatgtctgcaatttactaaagtaaataaaaccttactagcttcatgccttaagtggctggaacagccagagcaccatttattgacatattctcacccttcgtatccacctctattaaagcagatacatacccctccgcttgtgctttttgtggcaggaaaaccagatattcttttaaagaagcaggtggcgatggtagggagcaggacagcaagttattatggtgagagatggggaagaatttttgcaagtgaactggttggatatgagttagttattgctagtggtttagctatcggtattgatggtatttgtcaccgagctgcattggatagtggaggtaaaacagtagctgtattaggtagtgggcttggacagatttatcctcatagacacggattattagcaaagcaaattgaggagaatggtgctcttgtttctgaattttttccggatactccgccacgcgcaaaaaattttcctagaagaaatagaattatcagtggattaagctcagcagtgattgttgtagaggcaggtcaaaatagtggttcgttaattactgctcgttgtgcccttgaacaaggaagggatgtatttgcattaccagggcttttgggaaattcagtgagcgaaggcaatcactggttaataaaacaaggtgcatacttagctacaaatgcaatggatattgtggaacatgtttacagttcattacaatggttgaatatggaaagaacggaggaagaagtaaaaccgcagtttgagcaaactgagttgccatttactgatgtgctagttaacgtaggcgctgaagtaacgcctgttgatattattgctcagcgttcttcattacctataactgaggtcatgacaaagctccttgagctggaattactgggtaaggtgactgtggttgctggtggttatgtgcgtgtgaattaaattgactgaatttttagagtcctgtgcaacgtcatatgagaatgagtttttgagtgaaaatagtatggcaaaaatggttcctttctccaccaatgaaactgaatattgccctgaatgtggttctgcgttggttatgcgtaatggtatccatggcccatttcttggatgttctggttatccatcatgtcaatatattcgtccattaaaagggcaacgtgatgggcatgtggtaaaagaacttgaagggcagctatgtcccgcgtgtggagtcaatttgattttgtgccaaggacgttatggcatgttcattggctgtagtcgttatcctgaatgcgaacatacagaactaattgataaaccggatgagacgttaatagcctgtccgcaatgtaaacaaggacaactactccaaaggaaatcacgtttcggaaaaattttccatgcgtgtaaccgttaccctaattgccagtttgtattaaataataagccaattgcgggtaaatgtgagttttgttcttattcgttgctagtggaaaaacgtacatcacaaggtgtaaagttattttgtgctagtaagttgtgtggaaaacggcaaataaattaagcagagtaataaaatgagcaatgaagcatcacctgcatttgagagtgtattaacagcattaaaagcagaaaaagtgattgcctatccgactgaagctgtttttggacttggatgtgatcctgatagtgaaaaagcagtaaatgaactgcttatattaaagaaacgtccttggcagaaagggttgattcttatcgcagataattatgaacaattacaaccgtatcttgatgataaacttctaacagaagaacaaaaaaaagctatgtttgcttgttggccagggcctgtaacctgggtgattcctgccaaatttagtgcacctaagtggttgacagggcaattcgctaccttggctgtcagagttagtgatcatcctttggtgaaacagttatgtactttttatgggaaaccgttggtgtcgaccagtgcaaatttgaatggccttgaaccatgcagaacagcagaagaagttagacaacagtttggagataagcttcctatattaaacggagatgttggaggtcggaaaaacccttcagaaattcgggatgctttaactggtgagctttatcgtcaagggtaaggggagataaatatggatcaatttgctgtctttggtaatcctgttgcgcatagtaaatctccgcgtatccatcagttatttgctagacagacaggtattgagcatcgttatgggaaaattctggtgccgataagtaaatttcaagaggcattggatacatttcttaaacagggaggtataggagtcaatattactgtgccatttaaagagcaggcatttattcgagcaaatgagttgactgaacgggcaagactcagcggtgcagttaatactttgaaattacttaataataatcaattgcttggtgataacacggatggtatagggttattaacagacttgatgcgacttgagtttattactcaagggcagcatattttaatcattggagctggtggagctgccagaggtgttttatttccattattagaatttggttgtaaaattacaattacaaaccgcacgtttagtcgcgctatacaggttgctaataatttttcggcaataggcagtattcggcctgctgagatgaaagtacttaatagtcctgagtttgatctcattatcaatgcgactgcatctggtattaatggtgagattcctactatatctccattcatatttaatgagaattgtgtctgttatgatatgttttaccaggctaatttgacgccctttatttcctttgctaggaagcatggtgtttctcgttatgcggatgggctggggatgttagtggggcaagctgctcattcatttaaattatggcatggtgtattgcctgaaatttcacctgtgttactaacattggaacaggagttacgttcgtgaatcaatctatccaatttcctgatagagaagagtggagcgagcaagagcagatagtcatttttcccgcactggtaaatggattattggttcaatgtgttataagtgccaaggagcttttataccgttatggggcggaagatcatcatccactaagtctttttcgacaaaatcgttgggatatagaagaagaattcgaattagtaattaataacgaggatgatgatcatttgggacgttacatattaccttcctgcaaatagttatttttcaagctaacgtaatggcttgccgaataacatagcccttttaattcttcaggttttagttttctggcctggcgggcaggactaccaatataaaggtacccactttctaatatcttacctggggctactaggctgcctgcaccaataataacgttatcttcaatcactgaaccatcaagtaggatggagcccataccgataagtacttgattaccgatagtgcagccatgaagtataactttatgcccaatagtgacatcatcccccacaatcaagggaaaaccatcaggattgtctgttgttttgtgtgtcacatgtaatatagagccatcttgaatgttagtacgtgcaccaatagatacataattaacgtccccacggatgacaactaaaggccatatactgacatcatcagcaagtctaacatcaccaatgattacactagatgaatctagcataacgttctgaccaactttgggctgaatatcaaggtaactgcgtaacgtttcggacatgtatacctctgatgaaaaaatggatatttactttaaataagattttagtgaggaaaataccagtatgcaatgaaagaaacttgttgaacagggctattgtggttgaaatttcacccaaaaagaacaagaattcgcctgttggtggtaaatgtgaaaaaaagtattgtataaaaatctgagctccctataatgcgccaccactgaccgacacaacgctgataaacattgtgaggtcgggcagagaaagcgataatcagtgcttgactctgcgggcgaacagcgtagtatacgcagcccggctgaacgagaatgttattttttatgtcagcctgctctttaacaattaatcagacaatctgtgtgggcactcacaagaccgtatcacaaaaaaatacgttttaaagtcttgaagagtgaacaacagttaattcattacgaaataattagtcaggaattctttgagcatcaaactttgatttaaattgaagagtttgatcatggctcagattgaacgctggcggcaggcctaacacatgcaagtcgagcggtaacaggaaagtgcctgcacttttgctgacgagcggcggacgggtgagtaatgtctggggatctgcccgagggcgggggataaccactggaaacggtggctaataccgcataatgtcgcgagaccaaagtgggggacctgaaagggcctcacgccgtcggatgaacccagatgggattagctggtaggtagggtaatggcctacctaggcgacgatctctagctggtctgagaggatgaccagccacactgggactgagacacggcccagactcctacgggaggcagcagtggggaatattgcacaatgggcgcaagcctgatgcagccatgccgcgtgtatgaagaaggccttcgggttgtaaagtactttcagcggggaggaagggtttagcctgaagagggctggactttgacgttacccgcagaagaagcaccggctaactccgtgccagcagccgcggtaatacggagggtgcaagcgttaatcggaatgactgggcgtaaagcgcacgcaggcggtcaattaagttagatgtgaaatccccgggctcaacctgggaatggcatctaagactggttgactggagtctcgtagaggggggtagaattccatgtgtagcggtgaaatgcgtagagatgtggaggaataccggtggcgaaggcggccccctggacgaagactgacgctcaggtgcgaaagcgtggggagcaaacaggattagataccctggtagtccacgctgtaaacgatgtcgatttggaggttgcggtcttgaacggtggcttccgaagctaacgcgttaaatcgaccgcctggggagtacggccgcaaggttaaaactcaaatgaattgacgggggcccgcacaagcggtggagcatgtggtttaattcgatgcaacgcgaagaaccttacctactcttgacatcctcagaatttgctggagacagcgaagtgccttagggaactgagagacaggtgctgcatggctgtcgtcagctcgtgttgtgaaatgttgggttaagtcccgcaacgagcgcaacccttatcctttgttgccagcacgtgaaggtgggaactcaaaggagactgccggtgataaaccggaggaaggtggggatgacgtcaagtcatcatggcccttacgagtagggctacacacgtgctacaatggcggatacaaagtgaagcgacctcccgagagcaagcggaacacacaaagtctgtcgtagtccggattggagtctgcaactcgactccatgaagtcggaatcgctagtaatcgtagatcagcatgctacggtgaatacgttcccgggccttgtacacaccgcccgtcacaccatgggagtgggttgcaaaagaagtcggtagcttaaccgaaaggggggcgctgaccactttgtggctcatgactggggtgaagtcgtaacaaggtaaccgtaggggaacctgcggttggatcacctccttacctgagagaggttgagtgcagtgctcacacagattgtctgatgaaaatagagtgcaaatgagtctgcgaagctgaccagcgggtccccttcgtctagaggcctaggacaccgccctttcacggcggtaacaggggttcgaatcccctaggggacgccatattgcgggatgacgggtgaaaggcgttgtcaggttatctttaagcggatttaggtgaatctgtttagcgatagatgctctttaacaatctggaacaagctgaaaaattgaaatactcaataatatcgccgaggtattgttgaggtgtctctcaagctgaacagtccgagacagtttcgggttgtgaggttaagcgactaagcgtacacggtggatgcctaggcagtcagaggcgatgaaggacgtgctaatctgcgaaaagcgtcggtgagctgatatgaagcgacagagccggcgatgtccgaatggggaaacccagtgcaatgcgttgcactatcattaactgaattcataggttaatgaggcgaaccgggggaactgaaacatctcagtaccccgaggaaaagaaatcaaccgagattcccccagtagcggcgagcgaacggggaggagcccagaacctgcatcagcgatagcatcagaggaacggtctggaaaggccggcgagagagggtgacagccccgtactcgaagatggtatggctgtgagttcgatgagtaaggcgggacacgagaaatcctgtctgaaggtggggggaccatcctccaaggctaaatactcctgactgaccgatagtgaaccagtaccgtgagggaaaggcgaaaagaaccccggcgaggggagtgaaagagaacctgaaaccgtgtacgtacaagcagtgggagccgtgattaatcagggtgactgcgtaccttttgtataatgggtcagcgacttatattctgtagcaaggttaaccggataggggagccgcagggaaaccgagtcttaactgggcgaaagagttgcagggtatagacccgaaacccggtgagctagccatgggcaggttgaaggttgggtaacactaactggaggaccgaaccgactaatgttgaaaaattagcggatgacctgtggctgggggtgaaaggccaatcaaaccgggagatagctggttctccccgaaagctatttaggtagcgcctcgtgaattcatcttcgggggtagagcactgtttcggctagggggccatcccggcttaccaacccgatgcaaactgcgaataccgaagaatggtatcacgggagacacacggcgggtgctaacgtccgtcgtgaagagggaaacaacccagaccgccagctaaggtcccgaagtcatggttaagtgggaaacgatgtgggaaggcccagacagccaggatgttggcttagaagcagccatcattgaaagaaagcgtaatagctcactggtcgagtcggcctgcgcggaagatgtaacggggctaaaccatgcaccgaagctgcggcagtgacacgcaagtgttattgggtaggggagcgttctgtaagccggagaaggtggagctgtgaggcctgctggaggtatcagaagtgcgaatgctgacataagtaacgataaagcgggtgaaaaacccgctcgccggaagaccaagggttcctgtccaacgttaatcggggcagggtgagtcgacccctaaggtgaggccgagaggcgtagctgatgggaaacaggttaatattcctgtactgaatgtgactgcgaaggggggacggagaaggctaggccatccgggcgacggttgtcccggtttaagcgtgtaggtgggaggagcaggtaaatccgctcttctgtgaacactgaggcgtgatgacgagccgttacggcggtgaagtggttgatgcccggcttccaggaaaagcctctaagcctcaggtcatattgaatcgtaccccaaaccgacacaggtggtcaggtagagaatactcaggcgcttgagagaactcgggtgaaggaactaggcaaaatggtgccgtaacttcgggagaaggcacgctggcggtaggtgaaggggtttgcctccggagctgaagccagtcgcagagaccagctggctgcaactgtttattaaaaacacagcactgtgcaaacacgtaagtggacgtatacggtgtgacgcctgcccggtgctggaaggttaattgatggggttagccgcaaggcgaggctcttgacagaagccccagtaaacggcggccgtaactataacggtcctaaggtagcgaaattccttgtcgggtaagttccgacctgcacgaatggcgtaatgatggccaggctgtctccacccgagactcagtgaaattgaactcgctgtgaagatgcagtgtccccgcggcaagacggaaagaccccgtgaacctttactatagcttgacactgaacatggagccttgatgtgtaggataggtgggaggctgagaagtgcggacgccagtctgcatggagccatccttgaaataccacccttgaatgttcgatgttctcacctgggcccgtaaaccgggccggggacagtgtctggcgggtagtttgactggggcggtctcctcccaaagggtaacggaggagcacgaaggttggctaatcacggtcggacatcgtgaggttagtgcaaaggcataagccagcttaactgcgagagtgacggttcgagcaggtacgaaagtaggtcttagtgatccggtggttctgaatggaagggccatcgctcaacggataaaaggtactccggggataacaggctgataccgcccaagagttcatatcgacggcggtgtttggcacctcgatgtcggctcatcacatcctggggctgaagtaggtcccaagggtatggctgttcgccatttaaagtggtacgcgagctgggtttagaacgtcgtgagacagttcggtccctatctgccgtgggcgcaggaagattgaaaggggctgctcctagtacgagaggaccggagtggacgcaccgctggtgtacgggttgtcatgccaatggcatagcccggtagctaagtgcgggagagataaccgctgaaagcatctaagcgggaaacttgccttgagatgagtcttcccctgactgaggtcacggaaggaacgtttaagacgaagacgtggataggctgggtgtgtaagtgcagcgatgcattgagctgaccagtactaatgaaccgagaggcttaaccttacaacaccgaaggtgttttggtgttcagagggcagccggcagaagccggttgacagcagagagatgacttttcagcttgttcagagattgattcgggtggttgtggcagaagagcgacaacggccggaagaaaaccgaatatgcctggcggcgatagcgcggtggtcccacctgaccccatgccgaactcagcagtgaaacgccgtagcgccgatggtagtgtggggtctccccatgtgagagtaggacactgccaggctttaattttgtgttgtatggcgatagaaaagcaatacaacaccccagtggtagcgagtaggacaactccgtcgggaacggatttgaacgtcgcgaggggcggcggcccgaagagcaaacggcaggaaagccgtttgtaagctgccaagcttgatatttaagttttatgtcgtaacagcgatataaatcaaagagaattcggtggtgcggtagttcagttggttagaataccggcctgtcacgccgggggtcgcgggttcgagccccgtccgcaccgccaccttaatttaggggcgtagttcaattggtagagcaccggtctccaaaaccgggtgttgggagttcgagtctctccgcccctgccagttataagctaagtggcaactaaggtagtttatagtattggtgatccatatatgctacttggattagattattgataaggcgctggctttttggtcagcgcctttttcttaatggaactttgtaagaaaaacggatttgccgttacattaaaaatccccttatgcgagccttttctccagaaatgatctcacttggaaaatttgttcgcaaatattgtctggttcgtaaagctaatgttgccattgatttgaattcatcatttcattgatgttgttacacatttttcagttctcaatgttattcgatcttatagcaataaaacctttctttctaattatctattgtcaaagtgaattcttatagataactttttagactttttggcaattttcatactagttaaagtccttctgaactaagtgtctagaggatatgtatgaatggatcttaactaatattttgattgtgaaagtttttttcttaagaaaagctcggtttgaaggaaaggatacctaaaacgataaggtggaaacactacgtctgattcagcttatactatacgtagggattacttggtaaatagggagctatatgtgggaagatagcaaaagtaatcccaccgtatgctctatttgaaatttctttctcccttactattttcttaaatgatttacatggatgcttcttaacctcttgtagaagtatgtatgataggtatttttaatagctgttgaatgaatgcttgctgatcatttttttgtagccatatggcatataatgggcgttcaattagttcagtatttggataagagaccagctctggatattcattttgccagtgtattggtaagaaggcggctcctcttacgctattgagcagttggcgggctatatgtgctgaagtggttgtgatggtgggtaactgatcactttttaaaatccgttgttcctgatgatggaaatcagctccccattctagtttgatgtaatttttaatttggtatttcagattttcttctgttgttaataacttcaagcgaatatttcctaataataggctttggaactcatccattttgggcggttcggtagtaatcaacagatctaactcacgtgaatgaagctgcttaacaagggattgccgtgtagaaactcgggattccaatcttaattcctgatgttttttatagaagtcttgtaaccaggaagttaaatatgattcccatagtgatgcagtggcaccaattgttaattcagtatgttgagaagcatgcattatctcttttttagccaattgccaggtgctcatcagtgattctgcatagggaataaggcgctctcccgctgctgtaagacggatgttattgcgatggcgagtgaaaagatgagtacctaattgattttctagttggcgtatgcgaaagctaactgctgattgcgtcaggtacagtgattcggctgctctcccaaagtgacgagttttactgacttccaagaaggttttcagtaattcagtgtccacatatatctccaataatatttatcgttaagatttaaattttttgttttacagaacgccaggcctatctaatactccgcgccataattagcatgatagtaacagtactagaattaggagtgtgtcagatggccgaaagcttcatcacgactaatcgtttttttgataacaaaaattaccctcgcgggttctcccgccatggcgatttcaccattaaagaggcgcaattactagagcgccatggttatgcgttcaatgagttagatcttggtaaacgcgagcctcaaacagaagtagaagagctgtttgttgctgtttgccggggtgagcggcagcctgtgacaatagaagaaaaagtctggaccaaatatcttgcaaggattaggcgtccaaagcgttttcatactctttcaggcggtaagccccagatcgatgcttctgatgactataccgacactgatgattaatattatcacaagttatgaatataggggctttgcccctttttcattgctaacctgattgtttttgtaattgtattaataacctgtccatactgcgatagcttaaggcttccatgatatgtggtttttctatctcttttttttcttctaagtcggcaagtgtccgggatgttttcagaattcggtgccatgctcggattgaaagccctagctttattagagtttgttctagaaatacagcgtcgttaggtttgagcttacaaaatgcctctgtctctttactattcagatgagcattaatttttccacaacgtttcagttgtatttctcgcgccgccagtactcttaatcttacatctttgctgctttcgcttggtctaacagagctactcaatgttccaatgggtaacaagggaacttcaattgagagatcgaaacgatctaagaaaggaccagaaagtttcgctaggtatcgaagtatttgctgaggactacttcgattgttaatgccctgatgatagcctgtagggctaggattcattgctgctatcaattgaacttgggcaggaaaacaaacttttgctctggctcgggagataatgatttcccctgattccagcggttctctgagagcatcaaggactctgcgttcaaattcaggtagttcatctagaaatagcacgccgttgtgagcaagtgaaatttcaccaggttttgggagcccaccgccgccgaccagagctgccattgaagaactgtgatgaggcgctctaaatgggcgtgtatgccattgttgaggtgaaaggtaggtatccatcaggctattgatggcggcaacctcaagggcctctttgtttgttaatggtggtaatagactacatagccggcttgccaacattgtttttcctgtccctggtgggccaagtagcaaaagattatgtccgcctgctgctgtgatttctagggcgcgttttgcttgttcctggccaataatatcctgaagatccggttgtgatggttctgttaaggattcatgttggattggtgctgtcagcagttgttgttctccctgaagaaagtggcagatatgtaagaggtgttctgtcattaacgtttcattctgagataaaattgccagctccattgcgttttctgttggtagaataagttgtcttcctgcttttcctgcgctgagtgcggctggaattgcgccgttaactttccgtaaacccccggatagagcgagttcaccaagaaattcgtaatgacttagtttattggtaggtatttgttctgaagcggctagaatagcgatagcgatcggcaaatcataacggccgccttctttgggaagatctgcgggtgcaagattgacggtgattcttttaggcggataggtaaacccgctgttgatcaatgcgcttctgacacgatctcttgcttcttttacggctgtttcaggcaaaccaactaaggttaatccaggtaaaccattactaatatgcgcttcaacagtaacaataggggcatgaatacctatagtcgctctggtataaataacagcgagggccatcctattctccttagtaagaaagtgtatacccgttatctttcaagttgcctctttgttggctgcactcgctcaccccagtcacattgttatctatgctcccggggattctctcccttgccgtcgcgatccatcttgaaatccattgggtatatatgatggactgaaattagatgataaatagttttctattatttttttgcgaagcggctctgataaatatttttcgaagcaactataaaatttttattttgaaatttaaattaaattatttttattctattttgttgattttaatggcataattttttatgctttagtgattaaatcattgtgtctattatctttatattcttgttttgagatgttgttattatttaggttgtgtttttagattgattttttattggttgaatttaatttaaattcaaatttatatatttttacagtggatgaatttcgtatgttatatcactatgctttatttttaatgagaagtttttgtcacctaagtgattaataataagctctttatttttgattatagtcggatgatttgttttttatgttatctattaatgtgttgttttgtttatatctaatcagttagtttttatcacttaaatcgatctatttactgaacaaataatccgtatgacaagtatttaattgaaaataaaaggtatttttttatatcgagtaataaaacaaaataaatgttgtcaagctatgaagaacgtgataactcttaaatatagattaaacaaacgaattaaatgaccaagattatgaacacatttgtcctagtgattagcctaattattgtcagcgtggtggtgattattatcccaccgagcggggctgcacttggacgaagaaaggcttagaagaacagccaaatctctcgaagacccccgcaccgaaaggcgcgggggttttttttcgacaagcaaaatccggtagagacggaaacatacaacagaacaaaatcttgtctcacagggtaaacacaggggatatgaaaaatgaatggggcgcagtgggttgtaaaggcattacgaacgcaggggattgataaggtttttggctaccctggtggtacgatcatgccggtttatgatgctttgtacgatggtggtgtggagcatttgctttgtcggcatgaacagggggcagctatggctgcaatcggctatgcgagagccagtggtaagccgggagtttgtatcgctacatcgggaccgggagcaacaaacttaatcactggattagccgatgcattgttagattctgttcctattgttgctatcactggtcaggttggttctgaattgattggaactgatgccttccaagaagtcgatgttttaggtctctcccttgcttgtaccaaacacagtttcttagtggactcactggaagatttacctcaaattatggcggaagccttttctattgccactagtggtcgacctggcccagttttgattgatattcctaaagatattcagttgaaagaggggaattttgtaccacatttggtacccgttgaacaaaaggagccctgctcggaaagtgaattagaacaagcccggaaaatggttgcggctgcgacaaagccagtgttgtatgtcggtggtggagtagggatgtctcaagcagtttctgttctgcgagattttgttgtggaaacaggtatgccggttgcttctacgttgaaaggcttgggggctgccgattcagaacatccatgttatctgggaatgcttgggatgcatggttcgaaagcggccaatcttgccgttcagtcatgtgatttgttgattgctgtaggtgctcgttttgatgatcgtgtgactggcaaacttaatacttttgctccgtgtgcaaaaatcattcatctggatatcgatccggcagagttgggtaaattacgtcaggctcatgtgtcgttgctgggggatgtgaaggtattattgccccgtttgcaacagccattgtcaattatgccctggcaacaggaagttaagtatctgaaagctgaatatccttggtgttatgaccatcagggagagagtatctatgcgccttggttattgaagcaggtttcagatcgtaaaacatttaatacggttattactaccgatgttggacaacatcaaatgtggacagctcagcatatgacgtttgatgggcctgaaaatttcattacatctagtggattgggctcgatgggatttggtatccctgctgcaattggtgctcagattgctcgaccggaagatatggtgatttgtgtctctggagatggttctttcatgatgaatgtccaagaactggggacaattaaacgcaagcaattacccgtaaaaattttattgttggataaccagcgattgggaatggtgcggcaatggcaggagttgttttttgataagcgatatagcgaaacgacattaacagataaccccgattttgtcacattagcgaaagcttttgatattccggggcaacatatcacggataaatcacagattgatgaagcgctgaatgcattattcagcagtaagggcccctatttattacaggtatctattgaggaattagagaacgtttggccgttagttcctcccggtgcaagcaatgaaactatgttggagaaatcattatgatgcagcatcaacttgcaatccatgctcgtttccgtcctgaaatattagagcgcatcttacgggtaacgcgtcatcgtggatttcagatctgttccatgaatatggatcaaacaatggatggcgataatgttaatatcgaattaattgttgccagccaaaaaccggttaatttgttgtcttcacaactgactaaattagtggatgtcgctggcgtcaagatcctgcaacaaaaatcacaactcatacgtgcataacgtagaaataaaggaatgagagaatgacgaagcaatccgattacatttggttcaatggtgagatggttccttgggcagatgctaaagttcacgtaatgtcccatgctttacattacggcacatctgtttttgagggaattcgctgctatgactctcataaagggccagtggtttttcgccatcgtgagcatatgcagcgtttacatgactctgcaaagatttatcgtatgccgttgaaccagagtgtcgatgaattaatggaggcgtgtcgggcaactcttcgtaaaaataatttagtcagtgcttatatacgtccattggtctttatcggtgatgttggcatgggggttaatccacctgctggttataaaactgatgtcattattgccgcctttccgtggggagcttatttgggagaaggcgcattggatcaaggaattgatgcgatggtttcttcatggaatcgtgcggcaccaaacacaatgccaactgcggctaaagccggtggtaactacctgtcttcgcttttagtcggtagtgaagctcgtcgtcgtgggtatcaggaaggtattgcactggatgtttctggttatatctctgagggtgcgggtgaaaatctatttgaagtaaaagatggcatattatttaccccaccatttacctctgctgcattaccaggaattactcgtgatgccattattaaactggcgaaagatttagggctggaagtgcgtgagcaggtattgtcgcgcgaatcattgtacctggctgatgaagtttttatgtctggcacagcggctgaaatcacacccgttcgtagtgttgatgatattcaggttggtatcggtagatgtggacctattaccaaaaaaattcaacaagctttctttggcttgtttgatggcacgacagatgataaatggggctggttagatccagtcaatccttaatagaactatacccaatggatttcaagagggatcgcgacggcaagggagcgaatccccgggagcatagagaactatgtgaccggggtgagtgagtgcagccaacaaagaggcaacttgaaagatgacgggtatataaataatttaacgggcggttcgttccccgcctgttttgataacacgggagtgaagataatgcctaagtaccgttctgccactacgactcatggccgcaatatggcaggagctcgcgctttatggcgcgcgacagggatgaccgatgcagatttcggtaaaccgattattgcagtagttaactcatttactcagtttgttccagggcatgttcatttgcgggacttaggtaaactggttgcggaacagattgaagcatcaggcggtgttgcaaaagagttcaatacgatagcggtggatgacggtatcgcaatggggcatggtggtatgctctattctctgccgtcacgtgaattgatcgctgattctgttgaatatatggtgaatgcacattgtgcggacgctatggtgtgtatttccaattgtgacaaaattaccccaggaatgctgatggcagcactacgtctgaacattccggcgatttttgtttccggtggccctatggaggcaggtaaaactaaattgtcagatcagattattaaattggatctgatcgatgccatgatccaaggcgcgaacccgaaggtcagtgatgaagatagcaatcagattgagcgctcagcttgcccaacttgtggttcctgctcaggcatgtttactgctaactctatgaattgccttacagaggcactgggtttgtcgcaaccggggaatggctcattactggctactcatgcagatcgtaaggcgctgtttctgaatgcaggcaagcgcattgttgagttgactaagcgttattatgaacaaaatgatgacagtgctctgccgcgtagtattgcaacgaaagccgcatttgaaaatgcgatgatgttggatattgcaatggggggatcaacgaatactgtgcttcacttactggctgcggcgcaggaaggggaagttgatttcactatggcggatattgatcgtttgtctcgtcagatccctcatctatgtaaagttgcaccaagtacacaaaaataccatatggaagatgttcaccgtgctggtggtgtgatcggtattttaggtgagctggatagagcgggtttgttgaatcgtcaggttaaaaatgttttgggtctggatttgttacaaacgcttaatcaatacgatgtgatgcagacggtagatgagtcagtgaaggaaatgtattcggcaggccctgcgggtatccgtactactcaggcattttcacaagattgtcgttggccttcgttggatactgaccgtgtagaagggtgtattcgcgacattgaacatgcctatagtcgggatggtggtcttgctgttctatttggtaatttggctatagatggttgtattgtaaaaaccgccggggttgatgagggcagtctgacgttccgtgggccagccaaagtttacgaaagtcaggaagatgcggttgatgcgatcttgggtggaaaagtcgttgctggtgatgtggtggtcattcgttatgaagggccaaaaggtgggccaggcatgcaggaaatgttgtatccgacgacttatctaaaatctgtggggctaggcaaaagctgtgcattgattaccgatggccgtttctctggtggtacctcgggtttgtcgatcggccatgtttctcccgaagcggctaatggtgggctaatcggtttggttcaagatggcgatattattgatattgatattccactgcggaaaattcgacttgatgtagatgaaaggatacttgctacccgtaaagaagtggaatttgcccgcggtgataaatcgtggacgccgaaagcccgtgaacgtcaggtatcgcttgccttgagagcttatgcttcattggcgaccagtgcggataaaggtgctgtccgtgataaatctaagttagggggataatcgtatggctgcatgtcttcccttaacttcctcaccaaatggtgcagagtatttgaaagcagcattaagcgcgcctgtttatgaagttgctcaggtgactcctttgcaggaaatggagaaaatttctgcccgcttgggaaatactattttggtaaagcgggaagatcggcaacctgttcacagtttcaagctccgtggtgcgtatgccatgattgcgagtttgactgaggaacaaaaaaaccgaggagtgattaccgcgtcagccggtaaccatgctcagggggttgcactttctgccaatcgtttgggaattaactctttgattgttatgccggttactactgcggatattaaagtcgatgcggtccggagtttcggtggtaaggctctgttgtatggtgctaattttgatgaggctaaagctaaagcgatagaaatggcacaacaggagggctatacctttgttcctccgtttgatcatcctgctgtaatcgcaggtcaggcaacactggcgatggaacttttgcaacaggatgtgcgtctggatcgaatctttgtacctgtcggtgggggggggttgattgctggcgttgctgtgttgattaagcaactgatgccagaaattaaaattattggggtggaagcggaagattcagcttgcctgaaagcagcaatggaggctggacatccggtagatttaccacgagttggtttgtttgctgaaggtgttgcggttaagcgtatcggtgatgaaacatttcgtttgtgtcagcaatatgtagatgatgttatcacggtagacagtgatgctatttgtgccgcggtaaaagatctgtttgaggatgtgcgtgcgattgctgagccatccggtgcattggcacttgctggattgaaaaagtatgttcagcagcatcagcttagaggtgagcgactggcacatattctttctggcgctaacgtaagcttccacgggttacgttatgtctctgagcgttgtgaattgggcgagcagcgggaagcattgctggcagtgactattcctgaacagaaagggagtttcctgagtttttgccagaaattgggcgatcgggtggtaacagagtttaattatcgttatacggatgcagatcctgatcaggcttgtcttttcgttggtgttcgcctgagtcgtggtgaggtagaacgacgggaaattatcgaggaattgcgtaccgcaggatatcaggttgccgatctctctgatgatgagatggcgaaattacatgttcgctatatgatcggcggtcgtccatctaagccattgaaagagcgcttatttagttttgaatttcctgaatcaccgggggctttgctaaagttcctccaaactttgggaactcactggaatattacgttatttccataatcgcaattatggtacagatatgggtcgggtgttagccgcatttgaaatgtcagagcggaagtgcgttttaagcgtcatcttgatgcattaggctatgcgtatcatgatgagacggatacccctgcgtttaaattctttttgatgtgccaaaaacatttaaaacagccggagattgatcggtagttttggtgatgaaaaaacatgttctataaaacgacaaaatagcgccttgataaggtgctattttgattaggtttcattggaaagggggctaaatgggttctttggttatttatcgatagtttggtttttaagcttatttttttatttatcatagtgttatttcttttctccgacggtgggttttgccagccagatcaagatcagcaagatcagaaaaataaagccaaatagccaataaatctcgttagcagcaataatcaatccctgattagtgatttcacgtgccagagagtgactggcttgagcgtgtgtcatccctaattgttccattttctcataggcttgttgggcaataggattatggggagttatcgattcagttaactggacatgatggacagcttcgcgacgggaccacatggtcgtggtaatggaagtacccacggatgttgccagcgtgcgtaaaaagttaaataaactgcccgcagaagcgattttagcgggttcaacatcagataatataatggctgttagtggcataattaaacaggcgatagcaaagccctgaataaattgtggccaggcagcagtggaaaaatccattgatagctcaaaggtatgagttctccaaaagaaacagagtgcaaaaatgataaagctaaacataactaaataacgcatatcaatttttgaactaaaacgaccaatgagtggaacgagcattattggcactatccctaatggagccattaccaatcctgcccaagtggccgtataaccaaataccatttgcaatagttgaggctgcaaaaccagagtgcctatatggagtaggaaagccaaactgatacataaagtaccgatagtaaaattgcgtgatttaaatagtgataaatcaatgatcggatcatcatcggtgaattcccagatgatcaggaaagttatggcaataactgcgataatggctaatgcaataatttctgttgagttgaaccaatcaagctcttttcctctatcaagcaatagctgaaaacaaccaacaccgatgaccaataaaattagtcctacgatatcaattgacctcgccgttatttcagtttcccgatcttttaacagcatccaggtgatagcaatggcggcaaagccaaccggaacgttgatgagaaagatccacccccaatggtagttgtcgctgatccaaccgccgagtatcggaccacaaactggagcgataacgatagtcattgaccacagagccaatgccatattgcgttttagcggaggatagttgttgagtagcaaactttgagaaaggggcataattggcccggctgagataccttgcaggacgcgggaaataatcaacatttccaagctattagcaataccacataaccaggaagtgatcacaaataagatcattgaaattaagaaaacccggacttccccgaaccgctttgctaaccagccagttaatgggatagagatcgcgttagcaacagcaaatgaggtaataacccaggttccttgtgatactgatgaacccagatctccagcaattgttgatattgcaacgttagcaatggtcaggtccaatatttgtaaaaaagcggctaatgctaaagccagggttagccagccaagtttggctcctgataatggctcttttagcatgttaacctcacttattttgactggtattaacttgaatgatttcgttaattagccgatcaatttctacggtgttgtaagttaaaacgttggtttcataaacaatgccattacgaggcgtgtcagcaagcaccagaccaccctgatttcgggtatcaaccgcggcgtgcatggataaaccgatgcgtaaaggatgagcaataagttgttgtgcttctagttcaacacgaacgggtaaacgttgaactactttgatccagttaccggtggcgttttgtgccggcaataaagaaaatgcactgccagttcccatatcaagaccaacgatccggcccttataagtgacatcactaccatagaaatcgctaatcagggttacgggttgaccaatacgcacattggcaagttgaacttctttgaagttagcttcgacccaaagttggtcagcgggtacgataaccatcagtggagcaccactttttatttgtgagcctacttgaacactgcggcgtgaaacgtagcctgttaccggcgcgacaatctgggtgcgctgtaaggttaaccatgcatcgcggagctgggaagcggccagtttaatcgcaggttgttgatctaatggggtgtctataactagtgctttattggcataatattgttgtcgggcaacattcagctcagattttgccatttgtacgctattgcgggaatgaatcagattttctttggcgatagcacctgtgagtcccaaatgttcacgtcgttttaaatcgtcttgagcctgttgtaatgccgtttgtttgagatcaatgttagccaatagtttttcattatcaataatggtttggtgagtttgcctgacattattagccaaggtatttttcgctcgctcaaaagcatgttccgcatcaatagagtctaaacgtagcaaaatatcgccttgttgaacgaagtcggtattatcggcataaatggcggttacgctaccggtgatctgggccatcacttgtacctgattacccacaacgtaagcatcatcagtcgcttgataatgacgtaatgaaataagccaataggtgaagtaacccaacccgacaaaagcaaataagagagttgcgaggatcagtgctaacttacgttttgactttttctcattaagcggaggtgattgtatttctccggtcatgtgttctctcctatcacagtgattaaaagtaaattcgtcttaattaatgtgcctatatttgattaaacaccttggagtcgactacaaggtcaagcccttctcatctgataaaatgaaaattgctaatatttagcacttaacgccaagagcatgatttaatattaaaattgtttattatcgttattaacatttaccagataggctggattgtttatctggcaatgattaacggtattttgtgtcagtacccagaatatttatctgggtacaaatgaccacaggatagggctacgaatccattgatgttaattgtttaactgactcaagcggtcattcctccatcaataacgaatgtttgcccggtaatgtagcgtcctccagggctgagtaggaaattgactgtcagagcaatatcttctactgaacccaagcggcccagtgggatgttagataacagttttttcctatgtggcgcggggatatgagccagcatttcagtgtcaatcaagcctggcgcaacggtattgacccggacattaaatcggccaacttcaacagctaatgagcgggtaataccgatcatggcggctttggtggcagcgtagttaacttgccctgagttagctttaaatgcagtgactgagctcatatggataatgcagccttctccagcagtaatcatttcagggagaaatgagtgattcactaaatagatagaagaaagattggtggaaatgacattatgccactcttcttctttcatatttatcagcaatgcatcttgtgtaattccggcgttattgatgatggcataaggagcgccatattgtgagataagttctgctgacaatgttgtgacttctttcgcgtttgagacgtcacattgatagccctcacagcgataaccttgctgttcaatgtcatgacacaatatttgtgcttcatttatgctggatttataggtaaaaaccacgtgatagttttgagctgctagcatttttactatgcctttgccgataccacgtgatccacctgaaataaaaacccaaggggtgctgatattcattaagtgattcctctaaatttatgccatccgtctgccaataccgcattcatcagattttagttggcaatctgctttctttttgttgttcccatcagactcatctcaacaactaaagagatttcgccattcagccagatcgggatttccagcgtaccgtataacgaaccatcaacgtcgaatgtatcttttggtacgatcgtatattcgatatttggcatttcatctgggatttggcgattaagcagcgctggagagaaactcacggtgtgcataacatgcaaaacaatgagatctttgaggcatgtttcatcatgttcttgtttgccaaaataggttttaaattctgttgctagtgcagttttggcactttgctgcataaaaagataaaacatcagagcatcaagaaagatccagaattcattgacttccgggaaggtatgtttaaattcgatggatttttttattgtctcttgtatgggaacttggcaacgtggtttttcgggaaagctagttttttgtgaaaaatcgaaacaactatagtgaccaatcagaggtttcaggttggttgtttcgtcttgcagattaaaggtcgttttcccattccggttagtgtgcttagttttgacgcaatagcaggcatccagaggtacgggattgcgtaaattaacgtgccactgtctgcccatttcccgatttagttgtgacagataatcgtatccgcttttgagcgggatcatggccagcatgccgtgtactgcaataccacctaacccaacttctcttgcgattttttcatcaaaatggataggattgtagtctccagagaatttagcccattgactgagatcttttttgctaaattgaacgttcatctatcggccttcctgaaaataagtgcacagtttgtgccaccgaatccgtagttaacatttaaagcggtgtcaataagttggtgagttcggtggatattggggacataatccagatcgcatagcggatcagggttattcaagtgcatcgttgcgggaatcgttgctgtctctatcgctttgagacagaaaatggattcaattgctcctgctccggcaataagatggcctgtataggattttgtactggaaataggaatacgataagcgtgctcgcccaggctcatttttagaacatcggtttcgttaatgtcgtttaatggggttgatgtcccatgagcattaatatagtgaatatctgaggtggagagtttggcctgttccagcgccatctgaattgccatgacccgtcctttgcaatctggggccggggcggtcatatctgacgcatcagagttattgccatagccaatcacttccgccagtattttagctcccctggcaacagcgcaatcatagtcttcaaggcataatattgcggcaccctccgacataacaaaaccactacgatctttactgaatgggcagcaagccttttcgacagattcctgttctttactcaatgctccaagaatgtcgatactccagacaatgaatggatctctgatgctttcaccaccccctgccagcatcattttagtgcgtccactgcggataagttcaaacgcatcacctatcgccatactgccggttgcacaagctgcaaccggggtattttgatatccccgtaagttccagttcattgaaattgcggctgttcctacgctgtgcatagacataatattggtcatcggtgaagcaatgccttgatcagcataggaatggctgttttcaacggttgcatcttctccaccccagccagtgccaaaaatgacgccgcgttcaaaaggcgaataattttcgtcaagagcggttttatcgttaccaaatgccatcttgattgcttcatccgccgcaatcagcccaagtttgctgaatttgggcaggttctttaataactttttggaaaaccgtgatacatcaggcgagaaagggatattaccgaaaaatttagctacaacagaagcgtctgggtgttcttcctttttgtagcctacacgataatttaggattgcatcccaaatttcttgggtattttgcccaagcgaacagatagaaccatagcctgtgacggcaacgcggtgatagcctgtttgaatattcatgaaacattatctccaaaattcatttcctggtgacatgctttattttttaacacaaccaaataataggattggtagataaaagcatcataaaaatgaatgttagctgtgttgtgatattgtcatagacagctaacatcccagtgtattcgtgatgattattttgctaattcactaacgtaattgacaaagtcaccgattgttgtcgtattatcccgctggaacttatcgaaattcagttgaattcccatttctctttttaacgcaacctgaatagaaacgaaatccagactcactaaatgaatatcatcaagtagagtgtcgagagtaatatcttctggttcgatatcggttaattcagtaatttgagattgaagtaattcaaacagtttcatattaatgtcccctaaaaatttaaatttttctattattcctgggtgattaaagatttccctgaaattttaagtaagttatacgtttcttgtttgatggcgttagccaatatctcaatatcatcttggcttgtggcatatccgaagctgatgcgtaccgcactatcaatacgatcatcgggtaatcccatagcagccagaacgtgagaacgttgggttgatttgttattgctacaggctgatcctaaggataaagagatgccgtgacgtaaatctagcctgctggctagcgattcagcacgaatacccgagaaacttaaattgagagtccaaggtgcctgaaacgctggattggtattaccattaattaggtagttaacatgatgttgatctaaccgagatagcaaggttgttctgagcgttttgtaagtattgaagcgtccttgcaagctgttcagtgattctttagctgccgccgccagtccagcaagtcctaaggtgttctcagtgccgctgcgtactccttgttcttgccctccaccatgtagcaagggatttaattgaatacctggtgcatggtaaagcccgccaatacctttcgggccgttaaacttatggccggagaaagatatggtcgttacaccggaaagtgtgtcacagctaaaaggccgtttaccaatagcctgtactgcatcgatatgcagataaacaccggcctcttttgctaaagaggcgaccgcttcatagggctggatcacgccggtttcgttgttaatcgccattaaggtgatcagacgggtttgtggctgcaagttttcctggatactttgtacacttatccgtccttgattatcggggttgatcagtgttagctgaagtccgcgttgctgataccagagtaacggtgccagaacagacggatgctcaatggaagagctaataacatgatgagcagacagatccgaaccggaaagtgttgctaacaagctggataaggcttggttattactttcggttccccctgatgtaaacaggatttgctctgggactgtgcccatcaatgcagccatcgatattctagcgtcagtgagcaactttttcgccatgctacttaagctgtagtggctagatggattagcaaaaacagacattgcgtctttaatcgccaactgtgctttaacacttagcggtgttgtggcgttgtagtcgaaatatagacttgtcatatttttccctttagctgctcaaatagcttatgcagcatatcaaggcagtgttgctgtgcgggttctaactcacctaataatgcatctatgccttcaggcgataatgcattcaattcttcgagagtcttacctttagcatggcgacaaaactggttagacattgccagggaggcggtacatccccatgcacgaaaacaggcattatttacccgcccttggttatctaatgtcaggtcgatatcaaccttgtcaccacatacagggttacctaatgccagtttaatggtgggggcggataacgtcccctggcaatcaggattgcaaaagttgtcaataatgatgttgttaaacataattccaccttgctatttatactgcgggtgtagctgaggtactttcatcgtctgacatttttctctcaaggttgaccgcacagcaaccaaactctttagcagcagcggtacgcataacaaactgaattcgctgagaattacgccaggatttattaggatcggtacgcaagtagaccaaatcttctgtcagtaacatgccgggagtggaaacagagagtggatctaagatcactaattgtccggtttcgccatcaggtaattcacgtgttaaatcgttaggatcacggacggagaaatgaatataaggaggaacatgcttatggttatattcatcttcgatggcaaggacgtttgcttcaaccagaccatacatatcacgattccgggaagctggaatgcccatccattcttcgatatctgcattcaattcgctgcgggagatcatatccccggtaaaacgtttccagccgcccatagtaattaccatgctatcgcgatctaaagtgagcttggtattattctcttttaggaacgtaataaaacgatggatcatgaatggagggccaattaaatgccgggtgaatttgcctttccactggattaattgattcaaagcatcttctggggagaagtggtcctgattaatcatatagcgtcgggtatctaataaacccgtcaggaaattaaagattttgaccagtgccatttctggaatatcttctgttgacgggcataagcataggccggcaccgccagatactttgaacatactgcgataattggaatagacagccaatactgtatgatccatcgtatcgtggcaacgacgataaacgctaggaattccactggtacccgttgagcgcatttcatgttcgatttcagataatggtttgcttaataaacggtgactttcggctgatttataagttgcaacgggtatgagtgggatgcgaaccaaatcattatagttctggatatcttctggtttaataccttgtttttcacaaatatctttatagtaagggttattatgataatggaaattaaaagcgtccttaagcaaacaggtttttaattcctgttgttcttctttagacaacttatagagaaggtcgacatcggctattagccacttcaacggatttccgccacgagattttataccgtcatatatatttttgatattttccattttttcatctccggtagggtaaagagtagataaattaatctttgcttattataagttatagcgataaagcataagttacgtaggcaaaaatgatagtcattaataatttatttttattgaataaattggctatattattactttgatcattatatggatttgtcaatattgttaaaattatgctaaaaatagctgatttattcaaaatattcactttagtgcgaatatgaccagttaattcaagtaaattttttaattgtcttttatatttttgtgaagttcgttgttttttgatctattgaatgttcttttgtaaattttttcattgtcctaagattgggataatgatagaaataaaatataaataaatgccaaattaaaaaacgagtacgcatgatgaaaatggattgcttaattgtgggtgccggtcaagccgggttaagtttagctgctacccttgcggctaagaatattaatgtctgcatattagagcgggaggcacgtattggtgatgtgtggcgcaggcgtccagataatatgctattattcacttcacgcggtatgactcaacttcatggcttaccgttccctggaattaaagaaggttatccagataaaaatgaagtcgctgattaccttgagcgctatgcttcacatcataaccttgcgatacatactcaaaccgaagtggttgaggtgaagcacgatacagatggctatcgtgttaaaacaaaagatggaaaagtatttcatgcaccttgtttggttaatgcaacaggggctaatcaattagttgatattccggcgcttgctgagcggttttctaccgatatacaacaaattacagcagatcaatatcgggaacctaagcaaattaaaacgggcagccgagttgctgtcgttggtgatggtgcgagtggtcgtcagattgctaaagatttggcagcaactgcgaaggtgacattattttgtggttcctcccgtcctctcttacctaatagaatattgggcaaagatatcttttggtggttaagtaaaagcggtctgttatttgccaattattacagtttagtcgggaaaattatgcggcggcgtaatcctatcccttgtggtgatctgaaaaaccatcgattagctgttttggatataaaaatagcgaataggttagttgatataaaagacaataaattatgtgattcgtccggcaatcaatatgaggtggatacggttatctggtgtttggggtataaagatgatacggcatggttaacgcttcccggtgctgcggatgctaatggattcgtttgtaaaaatggtcatgcagaaggtgggaaaaccccttatcctgggttatttatcgttgggcggaaatggttgagtagccgtggttctgaattgatgttaggggcttataaagacacttgtcgggtcgctaaatgggtagaaaattatctgaaagagcatgtaccattaaaatgaatgattaatacagaatagtgatattttactctgtatattttatttgtcgtggattgagggtttattgggtagtgtttttatggtgttgttctgaattctgtatcattactaactgcctatcccatagggctattttatttgtcattttgaacctgggcagtgctcaaaatcctcacgtactacgtgtacgctccggtttttccgcgctgtccgtgttcaaactgcctgcaacaattacgcctattgggataggcattaagagtgcataatatagtaaatgttctattaggaataaaatgatacagaatctctaacatattgattttgataataatggttataaatataaattatttattttaggtaatttatcaaaaatactatttattcataacccagatatttttctttgtaaaatttagacctgttaatgttgatgataaattgaaatatttttgttgtgcttgttgaattctgttcttactggcatgttttaattcagagggccttaatccatatagcgtcatacaggtacgactgaagtgtgcgccatcggaaaatccgctattacaagctaataaagtcagtgaatctgatgaatgtatctcatcaatagcatgatgcaggcgtttccataatagatagctgcggaaattagttcccattttttctctaaagagatgcaagaatcgactttcggataaatagagttgatttgatatttcacgagaggatatacatttaaccggtaattcagtaataagagaggctgcttttatgattcgtttatcttgataacaatggcaatcttctattttacctaaaaggttatttaagatgaaaatatctggagaggtttctgattgtaaacaattagtaaaatagtttgctatcaaaccagatgattcttgatttaaatatattatatctgagcctctcatctgatgtagtaataaatgacataatgggttggctagatctatcagtagattaaaacagagttgcccttccgagtgtaatttatgtttaatattagaagaaataatgaatccatgtgcttgcctcgattcattttcagtatcaatcctcatgagtgaattatgtggtgatacacttaattggatgcaaggatgatgatgccattctgtttgcatattataagagaaaacgagatcttgtagatggaatttatagaatttaataaaatacggtgatttgtctattttgtgtaacatgatggtgtcctttattaaattgttgtgtgtattttaattaattgttttatataattattataaatctttggtgttattttttaattaaattatattaactgattaaataattattattagttactatatcataggaatactattaaataattattatgacgttacctcctatagtatctgggaaaaaataatttcactattgggaaatattgttatgacatggcatggagaattattttccactctgtttatcgctggtggaatattcgatttttgctagccaatcttaacaatatctgaataactcaacgttaaatagctactatccacttgatataattaaaagtattttctttagcgacataattaatgaccaaaaatttaatgaggagccaatattttcatataattattttgattggttataacttatattaaacatattatcatgagaacaaaatggttatatttttatgttctttgtgaattaggccacataaattataagtatgttggcataataccgaaaataggttacatcaggcttgtaatgaataaaaagacctgttaacgcagtttgttataacaatccccaaaacgctttaatcaagggttcattaagccgtcttctctgtacgcacatacctaattcaaacggctctactaaagaaatattgtccaataaagatatgcgactgcgtaccggttcagggctgttttctacaacgacattgggaattaatgctactccacaacccaatgcaaccatagaaacaatggcttcatgaccggacacggtagcgtaaattgatgggttggtaattttatggtgacggaaccagtgctcaatgcgcttacgtgatgggccgtgttccggcaaaatgaagggaatgttattccagtcaggggacttttgcattacaagtgctcgtacagcgcaagggagggaaggcgcaatcagtaccagtgggacttcacccattttggtgaagctgacattatctggtagtttttccggcttaccggcgatgcctaaatcggcatcattagactgtatcttattgaccgcatctgcggcatcacctgtggtgagtttaatttcaaccataggatgttctgcacgaaaacggtctaggatctgtggtaagtgactgtaggccgcggtgaccgaacaaaacagacgtaactcaccacttagagatgggctttgttgattcaaggaatgctttagttgctgatattgtaacagtgtctgttgggcaaattgtttaaattgctcgccggcaaaggtcagttttacggtgcgattatctcgtaaaaataatggatgtcccaaaatatcttcaatacgctgaatttggcgggataatgtggatggactgacatgcattgcttttgctgtgtggccaaaatggcagctttcagccagatgtagaaacagtttgagatcacgtatatccatagcccattctccttctcctgtccaatagtctgtgttgcataaaatgcaatatagtattgttaatatatcaatttaagcaatggctttcatgtcatatattgaaaatatataaacacctcacagggtgaggaaatctaaaaaatagtcgcagcacttcattgctgagcacaacatgatacggagtcactaatggctaattattttaatacgctgaatttgcgtcagcagttggcgcagttaggtaaatgtcgttttatggcgcgggaagagtttgttgatgagacaggatatttaaaaggtaaaaaagtggttatcgtcggttgcggagcgcaggggctgaatcagggcctgaatatgcgtgactccggtctggatatcgcttatgccctgcgtaaagaggccattgaagaaaaacgcgcttcatggcgtaaagcaacggaaaatggttttcaagtcggtacttatgaagagttaataccgcaggctgatttggtgattaacctgacaccagataagcaacactcttctgttgttagcgcagttcaaccgttgatgaaagaaggcgctgcactgggttattctcacggcttaaatattgttgaagtcggtgaacaaatccgtaaagacatcacggtggtgatggtagcgcctaagtgtcctggcaccgaagtgcgtgaagaatataaacggggttttggtgtgcctactttgatcgcagttcacccggaaaacgatccgaaaggtgaaggtatggcaatcgctaaggcatgggccgcggcaacgggcgcgcatcgcgctggtgttctggaatcttctttcgtggctgaagtgaaatccgacctgatgggtgagcaaactattctgtgcggtatgttacaggctggttcactgctgtgttatgacaaactggtggcagatggtgctgagccgggttatgcaggaaaattgatccagtttggctgggaaaccatcacagaagccctgaaacaaggtggtatcaccctgatgatggaccgtctgtctaacccggcaaaactgcgagcgtatgcgctgtctgagcagttgaaagaaatgatgacgccgctgttccagaaacatatggatgatatcatttctggtgaattttcctccggtatgatggctgactgggccaatgatgataagaaactattaggttggcgtgaggaaaccggtaacacttcgtttgagaattcacctgaatatgatggcaaaatcagtgaacaggaatattttgatcacggcgttttaatggttgctatggtgaaagcgggggttgaactggcattcgaaattatggttgataccggtattattgctgaatctgcctattatgagtctctgcatgaattaccgctgattgcgaatactatctctcgtaaacgtctgtacgaaatgaatgtcgttatttctgacacagcagaatatggtaactatttgttctctcatgttgcggtcccactgttgaaagagaagtttatgggttcgctacaggcgggtgatttaggtaagcccgttgtagataacggtattgataacgcccagttgcgcgatgtaaacgaggctattcgtcaccacccaattgaagttgttggccgcgtattacgtggttacatgacagatatgaaacgtattgcagttggtggttgatattgataaagataagggggagaaatcctccctctttgaatctaatgaatatggttctgagaccgtttgctaaagttttgggggataagtcgcgatttaccaactaatagagtgtttttccttcataaagaaaacggcgtttcctttctcccctttctgctacaattccatctcttaaagtactgctttgacataacttattaaataccatgcgattaaatcctagccaacaacaagctgtcgaatttgttaccggtccttgtctggtcctggcgggggcgggttctggtaaaactagagtgatcaccaataaaattgctcatcttatccgtacttgtggctatcagcctcgccatatcgccgctgtgacgtttactaataaagccgcacgggaaatgaaagagcgtgtagcacaaactctggggcgcaaagaggctaaggggttgatgatttcgactttccacactttggggttggaaatcattaagcgcgaatacaaaacgttaggaatgaaaagcaatttctcgttatttgatgatcaggaccagatggctttgttgaaagatttaacagccgatttactggaggaagataaagatctattacaaaaactgatctccaccatttcaaattggaaaaatgatctgctttctccacagcaagttttggcattggtccgttctgctcaggagcaccagtttgctgaatgttatcgccgttatgatttacatctggcgagctgtaatgtattggattttgacgatttgattaccaaaccgactttgctaatgcagcgtgatgaagaagtcagggagcgttggcaaaaccgtattcgttatctgttggtagatgaatatcaggacactaataccagtcaatatcaactggttaaattgttggtggggcaaagggctcgttttacggtggtgggtgatgatgaccagtcgatctattcatggcgcggtgcaagaccacaaaatttggtgttactgaaagaggatttccctaagcttaatgtgatcaaattagaacaaaactatcgttcctctggctgtattctgaaagcagctaatattttgatcgccaataaccctcacgtgtttgaaaaacggcttttttctgaactggggtatggtgatccattgaaagtgattacagctaataatgaagagcatgaggcggaaagggttattggggagctgatggcacatcactttatcaataagacccaatataaagattacgctattctctaccgaggaaatcatcaatcccgcgtgtttgaaaagatgctgatgcaaaaccgcattccttaccggatttctggtggtacttctttctttgcccgccctgaaattaaggacttgctagcttatctgcgggtgctgactaatcccgaagatgacagcgcattcctaagaattgtcaatacgccaagacgtgaaattggtgctgctaccattcaaaaactgggtgagtgggcgaatcagcgcaataaaagtctctatcaggctagtttcgatctcggtttggaacaaagtctaactggccgcggtttggcggcattacagcgttttattcactggatggatgagataactcgtcaggttgaacgagatcctttgctagcggtgcgtgatctacttcatggtatggattatgaaagctggctgtacgaaacatcaccgagtccgaaagcggctgaaatgcggatgaaaaatattaatcagttattcacttggatgagtgaaatgctggaaggtgatgaactgaacgaagcaatgactttatctcaggtggtcgcgcgtttcacattacgggatatgctggagcgagacgaagatggtgaggagtttgatcaggtgcaattgatgactttacatgcttccaaagggttagagtttccctatgtatttctggttggcatggaagaagggctgttgcctcatcagagcagtattgatgaagaaaatattgatgaagagcgacgattggcttatgtagggatcacccgagctcaacgggagttattctttactttatgtaaagaacgtcgtcaatatggcgagttaatccgtccagaaccaagccgttttttgcatgagttgccacaggatgacttacattggccacaagataaaaaaatagtgactgccgaagaaagaatgcaaaaagggcaatcgcgtattgcggatatcaaatcgcgtttagggcttggacaaaaaaataagtcataaatatgttggagattccctgtatcacagagatacagggaaagtgattttattcaggtttgagcatcctgctcgcctaaaacaagtgaccattgagcatggttttgccactgaatttcctgctgtaaagactctgccctcagagggtgttgcattagccagccatgaggtaacgttattgttaacgcttcatcactcacttttaaacgtagagcagggagcgtgtcatttcgacgacggttggcgaagatgatagctaaccgcaacagacgacataaacgttgagcttgtatcagaggtaaggcgttttgttgattaaaggaaaacaaatcaatagggccgctctggttctttagcaatgtggctaagagttttttctgtgcaggcgtatagccggggagagcgagataattgatcagataggctgcatgtgatggagcttgatggaaatcaatacttaggccaatttcatgtatcaaacaggcactttgtaataattcatgacatcggctatcaagttcccaaggtttagcaacctgttgtaggaagtgttcagccaattgtttgacccgttgagactgttcaacgtctagctgaaaacgtcgctgtatattacgtagtgttctggtacgaatatctggttctattggtaaatccagcatgccgtaaacaagaccttcccgtaaggcgccgcccgcaaggatcatactttcaatatttaatgcctggaaaatcgctatcaggatagcaaggccacttgggaaaactaaagcccgttccagcgtcaatccttctatttccagctcttccagcttaccgcattcaatcgctttatgtttgagctcttgaagtttcggcaaagtgatcagttcatccataccctgagcaatcatgatttcttgcagagcctgaacggtaccggaagcgcctacacaaatctgccagccttgttcgatcagttttggggcaatgagtttcaacgtttcatgtgcggcagcttcggctctggcgaaattttcttccgtcaggctacggtcattaaagtagccttcaagccaggtaacacaacccatacttaggctggataactgagaggcttttgccccattccccgtaaccagttctgtacttgcaccaccaatatctacaaccagacgtttttcagggccgccagttgtatgggcaacgccttgataaataagccgagcttcatcttcgccactgattactttaaccgggcaatcaaggatttctgatgcttttcccacaaattcgtctgaattttcagcgatacgtaaagttgctgtagcaacaacgcggatttgtgatggtggtatatcttgtaagcgttcagaaaaaatcctgagacattgccaacctctctccattgcctgttgagataagcggttatttttatctaatccggcggccagcctgactttacgtttgattcgtgccagtatttgcatactgccggatacttcacgcacaaccagcatatgaaaactgtttgaacccaggtcgatagccgcatagagcgaagaagaactcagcatcattttcagcctgaacgtttacggttattacgtggtgtattattacgatgcgacaaattgttacggcgctgatgatttcctgaacgcgaacggtatcggcgtttaggtgccggtaaatctttcagcaaggcttgactgttatatttgctgaccgggatagagtgttgaatataatcttcaatcgctggcaggtttagtgcatattcttcacaggccaggctgatcgaatgaccactttcacctgcacgaccagtacggccaatgcggtgaacataatcctcgcagtcgtctggtaagtcataattaaaaacatgagtgactaaaggaatgtgcaacccacgggctgcgacatcagttgcaaccagaatatcaatattgccgttgctgaattcttccagaatgcgtaaccgttttttttgtgctacatcaccggttagtaacccaactcgatgtccgtcagcagccagatgcgcccagatatcttcacaacgatgttttgtattggcgaaaataatgcatcgatcaggccactcttcttccaacaacgtttgaagcaggcgcatcttttcttcattagaaggataaaacagctcttcgcggatgcggtgtcctgttttctgtaacggttctacctcgatatactctgcatgattcatttgctcaaatgccagttctcggactcggtaagagagtgtggcagaaaacagtaggttcatgcgttcgtttactggtggcatccgacggaatagccagcggatatctttgataaaaccgagatcgtacatgcgatcagcttcatcaagaaccacaacttggaccgcattcagattaatgtgcccctgtttggtatagtcgattagacgtccggtagtgccgataaggatgtcaactccggattccagtattttcagctgcttgtcgtaaccatcaccgccgtaggcaagacccatctttagacctgttgcctgtgccagatcttctgcgtcagagtaaatctgtacagcgagctcgcgggtaggagccataatcagcgctcttggctgattggtttgacgctcctccgctgcgggatgagttagtaaataatgaaaagcagacgctaaaaatgctagcgtcttccccgtaccggtttgcgcttgccccgcgacatcacgaccttcgacagtgaaaggcaatgtcagtgcttgtatcggtgtacaattagaaaagcccttattatcaagagcttctataaccttggggtgcaaggcgaagtcggaaaacttcttttctgtcaagtgtgttttactcatagtgtggtagaatatcagttaaccattgtcttacgaaagtgtatccgctgaaataaaggcaaccttatatcagtaatgttacactagcatggtaaaaaattattctttggagtaaaaaatgagcgacaaaattattcatttgagtgacgctagctttgatactgacgttcttaacgcagcaggtccagttcttgtcgatttttgggctgcctggtgtggaccatgtaaaatgattgcacctattttagatgaaattgccccagaatattcaggcaaactgactattactaaattgaacattgatgacaacccggcaactgctcctaagtatggtatccgtggtattcctacactgttgctgtttaaagatggtcaggttgctgctacaaaagtgggagcactgtcaaaaactcaattgaaagaatttttggatgctaatctctgattgaagtgagctcacattaatgccgggcgtttagcgtatattattatttatttcattgaccgctagacgtccgtaaagaagcgtgataagttagcgccactgcttgtatcacatacatcatgttagaagtatgttgcatactgaataatctgtagtgtctgataagtctgttatctctggatagtctaaaatatccaatgggttatacgggaataatctggcgtatagctcgttacgttgagatagtttttatcgaaatcagtaatgtttcagcattatctcaacagcgtttttgacagcctgtcagtcttatttgagctcaatcttagtacttcaaattattacctttttatatgcataatgtattaaaggtctgatttgtttttgtacaaaataaacaggcaccgatcgatgacgctgccatactattcacgttcatagttcgagatataccccgagtttaagaacccaccattatgaatcttaccgaattaaagaatacgccggtatctgaactgattacacttggcgaaaatatggggctggaaaatctagcccgtatgcgtaaacaagatattatcttctctatccttaagcagcatgcgaaaagtggggaagatatcttcggtgatggcgtgttggagatattgcaggatggctttggattcctccgttcagcagacagctcctaccttgccggccccgatgatatctacgtttctcccagccaaatccgtcgttttaacctccgcaccggtgacacaatttcaggtaaaattcgtccacctaaagaaggtgaacgctattttgccctgttgaaggttaacgaagttaattttgacaaaccagaaaatgcccgcagtaaaattctttttgaaaacttaaccccgctgcatgctaatagccgcctgcgtatggaacgtggtaatggttccactgaggatctgactgcccgtgttctggatctggctgcaccgattggccgtggacaacgtggtctgatcgtcgcgccaccaaaagcgggtaaaacgatgttgctgcaaaatattgccgctaacatagctcacaatcatccagattgtgtattgatggtacttctgattgatgaacgtccagaagaagtcactgaaatgcaacgcctggtaaaaggtgaggttattgcttctacttttgatgaacccgcttctcgtcacgttcaggtggcagagatggttattgagaaagcaaaacgtctggttgaacacaaaaaagatgtgattattctgcttgactctattactcgcttagcacgtgcctataatactgttgttcccgcatccggtaaggtattgactggtggtgtggatgctaacgcgttacatcgtccgaaacgtttcttcggggctgcgcgtaatgtggaagagggcggaagcctgaccattattgcgactgcgttggtggatacgggttctaagatggatgaagtgatttacgaagagttcaaaggcactggtaacatggagctgcatctctcccgtaaaattgctgaaaaacgtgttttcccagctattgattacaaccgttctggtacacgtaaagaagaactactcaccacctctgaagagctacagaaaatgtggattctgcgcaaaattattcatccgatgggcgaaattgatgcgatggaattccttatcaacaaactggctatgagcaaaacgaacgacgatttctttgacatgatgaaacgttcatagtttttaactcagttcatgatcattttaattagcgccacagtttcgtggcgttttttgtattcaccgcgctgttatagctatatatggcatgtattttgcaggctgtatatgctgctatatataccttatggatttcaagatgcatcgcgacggcaagggagcgaatccccgggagcatagcaaactatgtgaccggggtgggtgagtgcagccaacaaagaggcaacttgaaagatgacgggtatatttgaaataaatattaaaagaatgatgtaagagcataagggccattaattttttcatataagcagtgttttcgtaagctaaggcgctcgtgagggtagattctggctagaaaatcatatgctttcggttgataaatgaccagggtgtgtttactttttacagagagttatcatcgtgaatattctcagcatgaatattgaaattttttatgtttttctgttttcttttgcgtttttgtttatggctcgcaaaatagcaaagaaagttggccttgttgataagcccaattatcgtaagtgtcatcaggggttagtgcctctggttggaggaatatcaatatttgttggcatctgttttgcttttgttatcacaaaagaatttattcctcacaagtggttatatttggtttgtgctggtgtattggtatttgtcggtgcattggatgaccgttttgatatcagcgttaaggtccgggcaaccatccaagctctggttggtattgcgatgatgtattttgctggcctgaagttagatagtcttggttatgcttttggcccttgggacatgacacttggaccgtttagttatgttgtgacactatttgctgtctgggctgctatcaatgcatttaatatggttgatgggatagatggattattaggcggattatcttgtgtctccttcggtgctttggggatcttactgtatcaaagtggtaatacggcactagcattatggtgttttgcatttattgctgccattctcccttatattgttcttaatcttggtttattaagccaacgtttcaaagtgtttatgggggatgcgggcagtacactgattggttttaccattatctggttgctcattgaatctactcaggggaatgagcgccctgttaatccagttactgcgttgtggattgttgccattccattaatggatatggttgctattatgtaccgccggttacggaagggaatgagcccattttctcctgacaggcaacatattcaccacctagttatgcggtctggattctcatcacgtcaggcttttattttaatcactgttgcagccactttattagccgctgtcggcattactggagaatggctggaatttgtgcctgagtggataatgttggcactgttcttgcttgcatttgtgttgtatggctattgcctcaagcgtgtatggaaggtagctcgtttcattaaacggcaaaagcgtcgtatgcgccgttcagctaaccattaagcatctattatcagcagaggttctgtgcagtgataaaatcagaaacgaaatctattcaggataaacaagctctggagcatgagctggatatcagagctttgtgcagtgcgctatggcatggaaaggtatggatcattgtactggcaataattttcgcaaccgcggcgctaggagcatcttatctgatgcaacaaaaatggagtgccaccgcaatcactgatctgcctacgactaatcagttgggaagttattactctcagcagcagtttttgcgcaatctggatactcacattaatatttcattggaaactcagttaccgtctatttcagaagaagcctataaggagttcatcactcaggttgccgcatatgatactcgccgtgaattctggttgaaatctgattattacaagcagcagcaggaaggcgatgccagagctgatgcggccttattagatgaattagtcaataatattcagtttattcctcatgatgataaaaaagtgctgaatgacagcattaaactgaccgctgagtcttctggacaagcaaatcaactcctgcgccagtacattgcttttgccaatagtcgtgccagtactcatttaaatgatgaagtaaaaggtgcatggattacccgtgcccaatctatggatgcattggttaagcgtcaagaaatggtcgctaaagcggtttatagccgcgaaatgaatgtattacaacagtccctgaaaattgcggaaaaacaagggattcggcgcaatcaaacggatacaccggtggatcagttgcccgattcaaaaatgtttatgttaggggcgccgttgttacaggctcaacttgagactttggaagcaatagggcctaagtatgatgtggactatgaccggaatattgcaatgttagcagcatggaatgttcacccgacgttacaggatcaattccaggcttaccgctatttgagaacaccagaggagcctgttaccagagacagccctcgcagaatgtttttgatgatcatgtggggtgcagttggcgctttagtgggagccggcgtggcattggttagatgctcacgtaagtaatcagataattattagggataactgcttctgagggatctcttctgcaactccagcagcaggagtaaatagcattaagagtattgtttgcaggaaaatctgcaagttactgactataagagagtcactgtgaaagtgttgactgtgtttggtactcggccggaggctatcaagatggctccgttagtacacgcgttggcaagggatgaagccttcgaagcgaaagtatgtgtcaccgcccaacatcgggaaatgttggatcaggtgttacacctttttgagatcactcccgattttgatctcaatattatgaaatcagggcaagatctaacggatattacctgtcgtattttggcaggattgaaacctgttttagcagaatttaaacctgatgttgtattggttcacggagatacgacaacaacaatggcaaccagtttggcagcgttctatcaacgtatccctgttggtcacattgaagctggattaagaacgggtgatctttattccccttggccggaagaggcaaaccgtaagattgcagggcatctggcaatgtatcatttcgctccgacggaaaattcccacaataatttattgaaagaatccattgcagataatcgggtttttgttaccggaaatacagtaattgatgcgttgctgtgggtacgcgatcgaataatgaatgatgaggctatgcggagtaagctagcgaagcattacccgtttattgatactaataaaaaaatgattctggtgacggggcatcgtcgtgaaagttttggtggtgggtttgagcgaatttgtgaagctttggcacagatagcccgcgctcatccagatgtgcaagtagtctatccggttcatctaaacccgaatgtcagtgagccagtaaagcgcattttgcatgatattgataacgttattctcattaagccccaggattatttgccatttgtttatctaatgaaccatgcctatatgatcctgacagattccggtggtattcaggaagaagcgccttctttaggaaagccggtattggtaatgcgtaatactactgaacggtcagaggcggttgatgctggaacagtacgtttggttgggacagaaacaaaaactatcgtggaagaggtgactcgattgttgacagacgatgctgcctatcagcgaatgagccgcgctcacaatccttacggggatggcgatgcctgtcaacgtattctcgacgctttgaaaaaaatcaggtgacactatgagctttgaaactgtgagctttgaaactatttctgttattggtcttggttatattggcttgccaacggcagcagcgtttgcatcccgtaataagaaagtcattggcgtggatgttaatcagcatgcggtagaaaccatcaaccgtggtgcaattcatattgtagaaccggatctagacaaagtggtaaaagttgccgtagaaggtggttacctgaaggcagtgattgccccgttacccgcagatgcttttctgatagcggttccgacgccttttaaaggcgatcatgagccggatatgacgtatgtccgttccgcagccgaatctgtggcgccggtgctgaaaaaaggtgatctggttattctggaatctacctcaccagtaggcgcgacggagcagatggcagaatggctggccgcagcgcgtcctgatttaactttcccacaacaggttggagaagagtccgatattgatatcgcttactgtcctgaacgtgtgttgccaggacaagttatggttgaattaattaagaatgaccgcgttgttggcggtatgacattaaaatcttcggccagagctagcgagttgtataaaattttccttgaaggtgaatgtgttgtcactaattcaaggactgctgaaatgtgtaagctgacagaaaacagtttccgagatgtaaacattgcatttgccaacgaactttctctgatttgtgctgatcaaggtatcaacgtgtgggaactgatcagtttggcaaatcgccacccgcgtgtaaatattctccaaccaggccctggcgtgggtggtcattgtattgctgttgatccgtggttcattgtttctcaaaacccgaaacaatcacgtcttattcatacagcacgtatgattaatgatgacaaaccattgtgggttgtgaatcaagtaaaagcggctgttgcggattgtttggctgaaagtggaaaacgtgcaagcgaagtgaaaattgcctgttttgggttggcatttaaaccaaatattgacgatttgcgtgagagtccagcggcacatatcaccggtatgattgcacaatggcatacaggtgaaacgttggctgtagaacctcatattcatgaattatctgcacctttgaaggaaataactcaattagttaatctggaaaaagcgctggaagaagcagatattctgttgatgctggtagatcataatcagtttaaagctgtaaacagtcatgaaattaaacagaagtggattgtggatacaaaaggagtctggcgttgagacgtattctaatcacaggtggtgcaggttttattggctccgcggttgtgcggcatatcattaataatacagaagacagcgtggttgtagttgatagcctgacttatgccggtaatctggcgtctcttgccccggttgcggatagccctcgttatgcgtttgaacaggttgatatctgtcaacgtggagcgctggatcgggtctttgaacaatatcagccggattgtgtgatgcatttggcggcagaaagccatgtggatcgctctattgatggccctacggcatttatcgaaaccaacattgtgggtacttatactttgttggaagctgcacgtgctttctggcagaaactcaatgaagagaagcaagctgttttccggtttcaccacatttcaacagatgaagtgtatggtgatttacatggtgaggagggcttctttaccgaaacaacaccttatgcgccaagtagcccatattcggcgtctaaagcgtccagcgatcatttggtaagagcatggcaccggacttatggtttaccggtcattatcactaattgttcaaataactatggtccttaccatttcccggaaaaactgatcccactgatgatcttaaatgcattagcaggaaaatctttaccggtatatggtgaagggaaacaaattcgcgattggttgtatgtggaagaccacgccagagcgctctatttggttgtgacagaagctgaaccgggcaaaacctacaatattggaggtcataatgaacgcaaaaatattgatgtggtttgtgcgatttgtgaacttctggaagaattttgtcctgagaaacccgtggggattgcttattatcgagacttgattacttatgttgcggatcgcccaggccatgatatgcgctatgccattgatgcggcgaaagttgagcgtgagctaggctggagaccacaagagacatttgaatcaggtattcgtaaaacagttcaatggtatttggaaaatgaaaactggtggcgtaaggttcaagatggttcttatgccggtgaacgccttggattaggtaaaaactgaatgacgatgggggcagtaaatatgaaagggatcattctggcaggtggatcgggaactcggttgcatccgataacacaaggtgtttccaaacaactactgccaatttatgataagccgatgatttactatcctttgtcagtactcatgctagcagggatacgtgatattctaattatctctacgccagaagatttaccttctttccgccggctgttaggtgatggtaacagatttggtattcacttgagctataaagaacagccatcaccggatggtttagctcaggcatttttgattggtgaggagttcattaacggcgggccttgctgtttggtattgggagacaatatctactttggacaaggatttagcccaaaactgaagaatgttgtttctcgtggcaaaggggcgactgtttttggttatcaagtgatggatcctgaacggtttggggtggtggaatttgatgacgtgttccgcgttctttccattgaagaaaaaccagaaaagccaaaatccaactgggcggtaacgggtctctatttctacgataatcaagtggtagattttgctaagcaggtcaagccttctgccaggggtgaactagagattaccagtattaaccagatgtatttggaacgtggtgaactaaacattgagttgttagggcgtggttttgcctggttggatactggcactcatgacagcctgattgaagccagcacttttgtgcagaccgtagagaagcgtcaaggttttaaaatcgcttgtcttgaagagatcgcctggcgtaatggttggctggatgatgcacagttaagagaaacagtaaaatccttgtcaaaaactggctatggccaatatctgctggatttgctccatgtccgtgcgcgccaatattgaaccattagagtgggatagccactattttgggttgtccaccgctcgccttgatttcacacctgatgccggtctgctaacctcatctcagttagatcagtatgctttagtgcaggctaaagtacctgcgcagcgattggatcttattgatggattatccgcgttgggcttttcgttagtagaaggggaagtagacctttccttaatgattggcatagaaaatgctgaaaatgctaaagacaatcctgagagtaacctacttttggctgagaggcgagatatcccgatgttgaaggaggtggcttccaacgtatttcctttgagtcgtttccgaaccccgtggtatcaaccacaggatagtggtcgtttttacgcgacttgggttgaaaaagcggtattagggacatttgatcatcagtgtttactggtaaacggagataatgagcaacccgcagggtttgttaccttacgggatataggcgcaggagaggctcgtataggtttgctagccgtattcccaggaaatattggctgtgggattggctcaaaattaatgttggcggcgcagcagtggtgtcagcaccaccaaatacatcagttaaggattgcgacacaaaccagcaacattgctgctttgcgcctttatacacgcagtggtgcgtttgttgaaagcaccgcgtattggttatataggggatgaaatgattccatttaacaaaccaccagtagttggcactgaattagattacatgaagcaagccatggaaagcggtaagctttgcggggatggtggtttcaccaagcgttgtgaagagtggatggaacaacatttcaattgcccgaaagttctattgacaccatcctgtaccgctgcactggaaatggcggctattttgctgaatatccaacccggtgatgaagttattatgccgagtttcactttcgtttccagttctaacgcgtttgtactgcgtggagcaactgttgtatttgtggatatccgtccagataccatgaatattgatgaaaccaaaatcgaagcagcaattacagctaaaacacgcgtgattgttccagtgcattatgccggtgtagcctgtgaaatggataccattatggccttggcagagaaatataatctgtttgtcgtggaagatgctgcacagggagtaatgtctacttataaagggcgtgcattgggaactatcggacacattggttgctacagtttccacgaaaccaaaaactactcctctggtggtgaaggtggtgcagcacttatcaatgatcaatcattgatttctcgtgcggaaattgtccgtgaaaaagggactaatcgtagtcagtttttccgtggtcaagttgataaatatacttggcgcgatatcggttcgagttatcttatgtcggaacttcaggctgcttatttgtgggcacaattggaagaggctgagaaaatcaatgagcgtcgtcttgccttgtggaatacctattatcaagcattaaaaccgctggttgatgctggtctcctgacattgccggtcataccggaagagctggagcataatgctcacatgttctatatcaagctgaaagatgttgaagaacgctcagcattcaatagctatatgaaggacgcaggtgtactaacagtattccattatgtttctctgcacaccagccccggtggtgaaaaatttggccgttttcatggggaagattgttttactacttgtgaaagtgatcgtctagtgcgcttgccgatgttttacaacataacagacgctgaacagcagattgtcatcaaacatattcgggaatacttcgcctgatatgtcgttggctaaagcatcaatatggactgcgggctctacactgataaaaatcggtgtagggcttttaatcgttaaattactggcggttgcttttggccccagcggggttgggcaggcgggtaatttccgtcagcttattactgtgcttggggtattggctggtgccggtatttttaatggtgtgacgaaatatgttgctgagtatcagcagcagccagaaagattgcgtgcggtattgggaacatcttctgccattatccttgggttttccacgctgttggcggtgatttttttgctgtttagcgggtctatcagtacgggattattcggccatcaagattatgagtcagttgtgcaggcactcgcctttattcaaatggggattgcttttgccaactattttttggctattttgaaaggataccgagatgcacagaggaatgcgctggcgattatttttggtagcgtgattggcgtgatggcctattatctctgttttgttcttggtgggtatgaaggcgctttggcgggtttggctttagtgccagcattaatcatatttcctgcgggattgatggtttggcgtctcaaagcggtatcaatttcaagctttaagcccatgtgggataaagtactggctggccagcttggcaagtttacccttatggctttgctgacttctattaccttaccggttgcctacattatgatgcgaaatctgctggcagcgcattatagttggcgcgatgtgggtatctggcaaggtgtaagcagtatttccgatgcttacctgcaatttatcacagcatcttttactgtttatctgttgcctacgctttcacgattgcagggtaagaatgaaatatcaaatgagataattaaggcgctgaaatttgttttg
